United States Patent Application Publication US 2015/0354009 A1 - sequence listing, part 22

SEQ ID NO: 685 - DNA, 254457 bp, Homo sapiens
gactgcgcatgcgcgtcactagacgacacggctgtcttctttcctggagaatttctcaaggactgctggctggaaacttaacggctaatgtggatctgaccgtagtttgccaaattaagaaaacggtgtgagcaaaacccacctttacctaccatgcacttgcatttgggcattagtagagaacagagctgaggtggtggttgacgttttgccctccttcatctgaggaacctctctgctttttaggggattgcttcctctttctcagtctttgtccgtcctaactccacttatttcccatttttcccacgtttgcatcctgttttgctcttgcgtttgcaacgtattcctgcagcccgctgcccggaacaagttttattgggatatttatattcatctgtgtgcttcagtttctctgtatcatttctgtttgctattgacttatattttaatttcttatgctattaagatgttacaagaaatttgcacgttaaaattatttttaattagttagataagacattatcaaactcaaacattgatttcgaatgtcatgagctgttgaggcatgtggaacccttgcatattaggtgatgatgcacatctgcagggaatgcattcctataaaagttccagttatttttttagagttatttgttcttgaaaatattctgggaaacagctcaaacttgaaatagtcattcccataactaataataagaaagtgttgtaaaatctacaaaaattgcatgggtcgaggtggggtaaacacctaagaatctggaagaatgtcagaatccctactcctagttattgtaaccactaagggacaatcttgctttattcttctttgccttatctgtggttttgtagaccactcttaaagcaaagtattataatagagcatccataaggtttaaagaattgtggaaatgcttgtaatcccagaactttgggaggctgaggcaggcgggtcacaaggccaggagttcaagaccagcctggccagcatggtgaaaccccatctctactaaaaatacaaaaaattagccgggcatggtggcacgcgcatgtaatcccagctactcgggaggcgaggcaggagaactgcttgaacccgggaggcagaggttgcagtgagccgagattgggccactgcactccagcctgggctgcagagcgagactccgtctcaaaaaaaaagaatagtggaaatggaaattacaaacctaacaatatttttaattatgctaaacttaatacgttatttatgggagaagagaatcctagtatctcaagtccttaaacttttcaaagtaccagagaaggagacaaaaaacacttatatgtgagtaactttaaggtcgtaaagaatatgtttattagccaaatggagaatgggtctcttaaaatttaaatttgcacagattcttgtctcttgctccatttaagagggtttctgagatattcataagttcttgcactattcaatagagttttttcacctgagatattcagagttaaatacaaaagtcatattaatctttctggaatgtaacacttggccttgaaatacattaaaaaaaatttacttttatttaacctgtaggctatgtggagtggaatttgctcacttaagttattatatatacaacattaattggacacgacagtatatatagactattttattcgttagaagagtcttcgacaccagtctcatttttctctttgccaactatgaaagaaaattgaaatgatgactttttcaaatttcaacccaaacacagctcaaagcatagttttctcaatatataccagctattagtaggagcacccatttctccaggtgacttcctgtagcacacgtataacttacaatgccaaaattcaaattagtctaagtaagtacgttagtaaaaaacattctatctagctgagcatggtggctcacacccattatcttagcactttaggtggctgaggcgggcagatcacctgaggtcaggagttccagaccagcctggccaacatggcgaaaacctgtctctactaaaaatacaaaaattagcagggcatggtggcacacctctgtaatcccagctactcaggaggctgaggctggagaattgcttgaacccaggaggcagaggttgcagtgagctgggatcgtgccactgcactccggcctaggtgataagagcaaaactctgtctcaaaacaaacaaacaaacaaaaaagccatgctatctaataactcagttctctgacttgattaagggctagtatgccaaaaaacaaaaaaattggaatattgatttttttgagaatgttactaagtagccatgctggaagaagttttcagataagcttggatggtactgcctgttacattcttctcttgtgactgatgttgcatattagcatgttcaattccttcactcctaatgttttctaaacttgaccttaaaaaatctttttttcttatgaaatgtattaatatgcactgtaagtgttccatgaaatatagtttaagaaatactgatggagggaaggatggacttcatagccttctggcagccctcctagaatatcttttctcataattaaacttttgatccatatgtggcatcagagagctgaaggttatgtttgttgtcaagaatcagagcatgaatgctctgtgttgtcaattaaggacaagacatagactttaacattcaaataaatggtatgtaaaattaatagtctcttagggaaattcaggagaaagaccaaaatacttgtcagaatagacatgcacagaaatgggctgggagatctgtggagtactatagacaggcttaaggttttccttagaagatagtccaggttcattcttacatataggtaaatgaattctcccagataaactatagttgtgactattgtaccctgagaaaaatgtaaagcaggattacgaagcttatcctagccatagtaaaaatttcaataatggattcacaaaaatcaatattaaccaatgtaatttcagaatgatttaggtacaaaatttaggtttatgtaagtcactctcaaatatagatttgtcagttatcagtcattttggtttgttgttgttcttgttattgttttgagacgtaggcttgctctattgcccaggctggagttcagtggcctgatctcggctcactgcaacctccacctcccaaattccagcgattctcctgcaaccgctgcctggagtgcagtggcctgatctcagctcactgcaacctcagcctcctgaggagctgggattacaggcgtgtaccaaaacgcctggcccattgaatttttgagagaatactaaaaataataattttattttcagaaaccacatcttcagcataaaggaaaataaatgtcaataacccttcgccacctcttgtaattcctgttgaaatccataaggttatgctgggtgcagtgactcacatcttatttccaacactccagagactgaggcaggaggatagcttgatcacaggagttagagaccaacctaggcaacatagtgagacttcatctctataaaagtaaaaataggccgggtgtggtggctcacgcctgtaatcccagcactttgggagcctaaggtgggtggatcacctgaggtcaggagtttgagagcagcctggccaacatggtgaaaccctgtctctactaaaaatacaaaaattagctcggtgtggtggcatgcgtctgtagtcccagctactcaagaggccgaggcaggagaattgctcgaacctgggaggcagaggttgcagtgagctgagatcacgccactgcactccagcctgggtgacagagtgagactctgtctcaaaaaaaacaagtaaaaataaataatcaatccataaggatatggtttagaatcatgtatatcacattaaaaattcccagtgtaacctagaatcagtgtgtctccatcaaggttgactaaaattagactcatctttggtcccataatccttcctgcctttacacaaatctctgtataaactttattttttatcctaataaatgatctatatctctgaaatattgtgagagtggaacagattttaaggaaaataatcaggtcatatttttctggaaattagaaattatactgcttagttctcttgtccttagtacatcaacactaaatataatgaggactgaaacatcttggcccccccacagtagttaaaggatgaataaaatttgtgcatagtttgttatataatccaaggagagcaaaaatataaaaagtattttatggcttttatcctaaattagttatatcttaaatgtaaacatgtttaagtatttcacagatattctgaaaggataagccaaaaatagattaggacacagtaacccataggggtcagtataaacttagaattggaagagaccatattctgattaaagacatgcttttatctgttaagacacacattgatagttttggaaaataattcaaaactaagatacagtgtcaaatgtacaaaaactctcttcaattatggtcttaatgttaaaacagcaaatgaacaatattctttccacacagattttcttattttgctgaaatctaagcctataattccataacaagcagatatgtttataccagtgaaatagatgtctacaaaaataagtttatttcaggcagaacatacataaattcaggaaaaaaggaaatattcactgtgtaaataataaagtggatagcaaattcaaatatgtgtctaatatttaatgtactattttataatcattgagaagggagtgacttcttgaaaaagtgtaaatgacatttctaaaacatttcacttttcaagggcagatgtattgaccttgataaaataatgaaattatatactgaagaaattcttcacattcattcacccaaaacgttatttatttgtgctacagaaaggaatcaactagttcgatttggcactcatcagatttttgaattcttattaaacatgttattaaggcaacgtctaaatcagcaccttccaatagaaatgaaatgtgaatcacatttgtaatttaaaattttttgtagatgtattaaaagaaacggatgaaattaattttaaagatgcatttaattgaactctatatccaaaatatttcaatgacattaatataaaaattcttaatagaatgttttacattatttttcatataagtcttcagaatctggttgtgttatataattaagagcacatctccatttggaccagcatatttcaaatgtccagtagtccctatattggacaatgcaggtctgtaagctgaaggagaaagtcgaggcaattatccaggtgatacaagctaaacaaggaagcaatcatatttttctttgtataagttatttagatatttcagataaagtggttttaagcctgtgcatttgctttaggtattgaacctaaattgatttcttatataaaaatcagatatgagagatttgtaagaaggataaatgttatattctgataatcatttaggctatcaaagtactatactatatgatactatatgaaatttgccagatttgactttattttccagtaatccatatattccattatgttattttagccaatttatcctgatttcttttttattcacctgaatttctatggccttagctgctttctttcctccagaattaattgtaagaatagaatgatatccagaggccctgacattttaagtggcctgatctcaagcgacttcagacagtgattttttcttcttacccaattctctacacctcactccactgactgtattgtccattattgcgtaaaacactttggcaaattcatacctaaagctctttctactgagtgattaagaactttgggtactttttcctcacagtttttaccctgttgaagatttgctttaacttcaaaagtgatgacaagaaagtatggacaccccttcaggaccaacctgataagtcactggtaaggtcttaatttctccataaagcttcctaatattttctagtattaaggtcttcatatcccgtaacccgctttgcatcacctgcagaaatcctaggcttagctgtttggtagcatctggctgtgtcatttgttctattatttttcgcaggctcccacctagagtcctgttatagtgaaggctggcttccactagtttccattattgcttatgggtctgtccctttcctccagaaaagtcctatctttttaaagatgtaatgtcagatgaagcttatgagccaaccacaggccatttttttaatcgacatctcctgaaggaaattttctgccttagctggcctgacttacttgtattttgtggcagaatccagtctttctaggaatcatccagttttaaaaatcatctcagtggttgtagagctgacagcagaattctctctacctattttctccgccatggagaaagcattcccagcatcatttatacaaatgctatgcacatttccacttcccagcaatactcatccagcagtttagatgccatgggagggtactccatagttcagttctatggtatgctttgatacgggcatggctggacactgcacattgttcagcaattccaaatggtagtctttagtaagagaaaaaacataattagagtcacttaacatattatgtggcagcggggggtggggaaatatcctttaagaagtagctttcacatacaaatggagtccaaaatagtgaacttttcccattggatatttatatgaatacaaccatggattaaatgccaataggagaaagtgttttagagacatgcttaaaatctggagaaagaaaacaaaaaacaaaaaaaactcctgcagccagctcagtgtctgcccaaacagccacccagttttgtgcttgaaacccagggccctggtggcgtaggcactggagggaatctcctggtcagtgggttgtgaagaccgtgggaaaagcatagtatctgggctagaatgcaccattcttcatggcacagtccctcacggcttcccttggctaccagagggagttcctcgaccccttgcacttcccgggtgaggtgatgccccaccctgcttctgcttgcccttcgtggctgcacccactgtctaatcagtcccgatgagatgagctgggtacctcagttggaaatggagaaatcacccaccttctacattgaacttgctgaatgctgcagagagctgttcctattgggccatcttgactaattgcaagaatatttttaagagcctttccagggcttcttgctttctctaggcagactctcagaagctctgtcccagacacattaaagcagtaataagcaacttaatatcttaatcctgccctgagaaaggtacttcatactttatagagttttgaggcactaagaatcaacaaaggggaaaaaagttccttatcctaattgagtggcctaggaaacaacatgtagtattatgactatgtgttttaattctgtcaattagaactcaaaattttctttttagtcagatcagttctatagttttgataaatatcacaaaacagaaatgagagtacaatgcatttactcatgggtgcttagacatcagaagtctcattattttctttgccctctttcctagctgttaatataatgctaagattaagttgacacattgactagactgtgatctctctttgccctctgctttatttaaagattttcctttggcgagcagttatatatcaggcactccccaaacccaacatcagagacactcaaaattgccgtgaatattctagtagcaatctcaaaagttttaagttcttttgtatatagatagacttgacacattctctcaaagcatatactgtttctggcttttcactgtctacaatgccagtgccggtattgactgtaagagcttcccatggcatgaataaacagtgaaaaggtccaacagagcttaaaggtatatagaaaaaataatagaaagttaaaaaaagattaaagaaaacaatgagtatatttgtagaaataagtgaggttagttctatttgatttgtagtggcaaccatagtcaatttttttttttttttcttgagagggagtctcgctctgtcacccaggctggagtacagtggtgcaatcttggctcactgcaagctccgcctcacaagttcatgtcattctcctgcctcagcctcctgagtagctgggactacaggcgcccgccaccacgcccggctagttttttgtatttttagtagagacggggtttcaccgtgttagctgggatggtcttgatctcctgacctcatgatacacccgcctcggcctcccaaagtgctgggattacaggcttgagccaccatgcccggcctatagtcaaattttttaataaaattgctaacctacacttagtatatccaataacgaatgcactattttgattttcaattctgattttatgcatgtttgagtaatcgatgcatacatatgtaatattttaatgttagtaatgataaagaacaactacaatttatttaaataatgcttcaggtactttttctattcaagttatttacttaatccaaagggaataaattttttgaaaatgtagtaatagtgatcctggaaaaatgtcatgttctatttatatgcctacagtatttactccatttctatctcttccctttgatctgtttgatggctatgcctgccttatatttctaagaattttttttcaaacaatttttagtgggttgtggtgttcatctccgtttcttactgtacaaatacttttctgttaaatttaaaggttactctctaaagcttagtaggtgtgctttcattttcacactgataactaaaatccacatcattactaatcatagacatgcatatgtgttgattataaagtgatattgtacataccacaaaatcagagatacaaaaataatcttttgttctttttaaaaaacttaatgtagaaatatcataaaatgaagttaaattgagtaaatcttaagacatcacttagtcaagctccttgcatcaaatcaagcccatgattatataagtgtatagaaaagcccacaaaaaattaaaaagaaagcttttcagtggaaaacctgacagacaccttatccaaaagatcaaagttttaacatcaccagtaatagaacaaataggtttcatgtgtcttctgatgtaatgcactaaggagtgagcactatcactcctgaggcatttttgccaaaaacatataaacgggaataaatcatgaagaaatatcagacaaacccaaattaagggacattatgcaacataaatggcctgtacttttcaaaatgtctaggtcatgaaagaaaaggactaagaaactgcccagattaaaggaaaccagagacttgacaactaaatgccacatgtaatcatggattagatactggagcagaaataacaatactaataaataattactgttactgctgtaaagaacattattgagacaattagcaaaatttgaatggggcttgtgaattacaaagcagtatcatatcaaaactgattttctgtttttgattgttataatgtggttatgtagaaaagtattatatttttgaaaatgtacattgtagtatatgggagtaaaaaggatcatgttggaaatttattctcaaacggtttacaaaacagtatgtatgtgtgtgtgtgtttgtgtgtgtacatacacacacattgtgtaaagtaaacaagataaaattttaatatttggtgaatagaggtgaaagatatatagtaaattttgtacagtgtttgcaacttttctgaagtcagaaattagttcaaattttttttaaatattgctttggcttcctattttacctgtagttaactgtgtcaaaaatatgctaattatgttatcaacacccagggtttttgtaatctcgcaatattgaaatcaagagacatcacagaacacagcagcaaaggtaagttttgttttttttttttgaggcggagtctcgcggtagcccaggctggaatgcagtggcgcgatctcggctcactgcaggctccgcccctctggggttcacgccattctcctgcctcagcctcgcgagtagctgggactacaggcgcccgccacctcgcctggctaattttttgtatttttggtagagacggggtttcaccgtgttagccaggatggtcttgatctcctgacctcgtgatccgcccgcctcggcctcccaaagtgctgggattacaggcgtgagccaccgcgccccggcagcaaaggtaagtttaattttattccagcttgtgctcaagggagctagcactgagaaaggaaaaaggagttggctgttccctgagggtagtgtgtgggttaatttaataggctcttttcatagggaaaggttatattagggcatatataggacagctttttctagtgcttgcacagtagctcaacatgcttctccatacattacatgtagcattagcatttaaaatctccacccttgtgtgtgaattttagcattaaaatgaggaagagataactttaggttggatttttttttttttttttttttttgcagatggagtcttgctctgtcacccaggctggagtgcagtggtgcgatctcagctcactgcagcctccgcctcccgggttcaagtgattctcctgcctcatcctcctgagtagctgggattataggcatgcgccaccacacccggctaatttttgtatttttattagagacggggtttcaccaagttggtcaggctgttctcgaactcctgacttcgtgatctgtcttccttgctctcccagcgtgctgggattacaggtgtgagccactgtgcccggccactttaggttggatttaaagtccaactgcacgtgcaaggctctggggaaatccctaccccgctgaaataggagcttgctgttaagtttcttgggtctcttgtcactgattggctgaaagttaaataagctagtgtttgagtgaggggctttatcgtttcctttagaccatcttaaaatagggactcaaccagcctgcttgtcttaatcatataaatttatttaaaattatcttaataaaccagaacgtggagactatttttttaaaagaattatttgtcgaagtattacatttttagtaagttatctctttttcttctgtagcttcctcatttttaaatttaaaccagacaaaaagtttcagtatacagcataaagaacatttgatgaaaatttgatggaagtaatttaaacaactataaatacattaatttatatcaatttttgattatgggagagtaataatcctttattacaagttgaaacatcccctgaatacattagaatgaatgctactgaaaacagaaataatttttacaattatctgccacatatcataatgcctcagacaaattttgtgtatgcatatagaagatgaaaaattatttcctaatacactcctaggttttctggttagagtcctctaaattaaattgacaaaaggcagaaaaataaggggaaaaaaacacaaaagtttattaacatatgcattgtgcatgtaacatatacccagagatgagtaactcaaaggtttggttagaacttggacttatataggatttcagcaaagaaacaatttttagaaaaatgacaagagtctctaggagtggcagattgtgcgaaggcaaatatatgggaaactaggtaaataaaggctagtttgcaaagtttgttatatacagtcctctgattctgtctgcaggctgtaagggtctaaagctgtctctggtaattaagttttgtccttccttgtagaaagcgggggacaactttgtaaatttatgtcctgcttttagatgacagaagaacagagagcttttcttgtatctttttcttctcaattgccttcagcacaaagtaatccttgtgccaaagtggaaaagtttgctgtggcatattctgccaccctaccatagctaggatagaatacatctgtacgtgaaggtctttgagggcagaggccagattaatttgtagagttttactgccatcacctaacctagtgcttgacatggagaaggggcttggtaaacaattgaatgaattaatgaatttggttgtgccttccatattttccgcacaacactcttgaagtaaataaagaaaaaaaaaggaaaaaagaaaaaaaaaaccactcttgcagtaaatatattcatatacttttaaatactattctaaggtcaaaaacacctttatcaaatatctaaaagctaatgtgaagaaaattacatgaacaccaaccaaattgtataaaataatttcgtatgcttggtttatgtacttgttttgaaaagtgggattttgccttagaaatcagaggccactttacatcttaactgagaatcattttcgtcaactcttggaacaaggacaattgcaaggaataaatatgacttaatttttggaagatgtattctgtgaagaactgttatagtaagaggaattatttattcttataaaaagaagaatcttgaaataaaaaggggcagtcccaaagtgaagggatcattttcagtaggtttgctattttccttatcagaaattcacagcacacattacttttttaagactttgacaaatactgccataaataaaattatttaatattgtttaatccaatgtttcttaaatgtgtatgatctcaaaccctgaaacaaaacaacatatcacatcccgtggatcatcatttaggaaaacactattaaaatgttaaagcaaactaaatatggtctgagaaggactccgtacttctatatttgagtccttgtggatgagctgcagcctgacttgataggtagacaagattgaaaacctaacttaggagtatgcgccagaaacaatagatgagttttggccaatcctagcagcagaagttcaaccactcttacactgcctcgtgttcaaactgtgttcaaataaggcaaatgctgagctgtaatcaatctagttgtttctgtacctcacttccaatttctgtacttcacttccctttttttggcctataaatctgccaccatgtggctgctctagagtctctgaatatgctgtgattctgggggctgcctgatttgtgaatcgtgccttgctcaattaaactcctttaaatttaattcagctgaagtttttctttcaacaaaaatattctttttttttttttcctggaatgtggtagctaggtggtctgtatttttactgagaataaaatgagacaaaatggaaaaactgaattaatctattacatgagatataaataagaggcctaagtatttatacattgaaattatttcccaaaggagaattagaatctcactgaaaatagaagagctagtcatctataaagtattaattttgaaggtttaggttaaaatattagaacaaactaatgtatcaaagtggcatcattctttaggtaaaagatatgtcagtggtaaaaacaacattaaattttctggaataattaggcttcaggatagcatcagtcgtgtgttactggaatacagaaatcaggatctaagggaagcacacgtggtaaacaaaaatcacgtttaataacaaaggagagtggttaacacatttccaattcaaaactagaagagtagaatctagtaaggatggctagtttaatagcagagccatcaaaggcagtgttaaagcggaaggatggtggcagaaatcattagcagtcgagtgcctgagtattgaatgttgcatctgttgaagtctttatcatgaattagcagtgactgtgctttggtagcatggttggattcactgtaacttttggattattgctgtatgtcttgccttttgtctttttgcatggaagtaattgtcaccaaaaattgtctctcttctatttttttgtcccaaatttacaacatatgtcttttcttaggagaaatttctggtgccagttgattgtttctttctagaaataacatattcatagacacatacacaaatgtggctaattcatcacaaaatatacccatgtaacctccacattacccccctgactctaaaataaaaataaaaacaaatgtagctgataaattgaatagccaaacttaaaaataaactttttttcttttaaatccatcactgtccctattaaacttgtgagccagcttctttctgcagaaattgaaaaagtcttgagtccagtttcatcatttctggttgtttcagatgataaaaagtcctccagtcattttattccccctaaaccagtcgcaattcaattattgttatctttctttcagaataataagtatggcatttaaaaatattatgcaattatttgttctcttgttttggtttcttttttgaggattccaaccatagttgcttgatccaccctcgtcttctatatttattatttcatgtttaatgcattttaagtttatttctgttatacattttcatttataagtttcatcctctatgttccaatagtatctaacttccattatgttccttctaatttcatttctcatattagttttttgtgtgtatgattttttttctttatctcttgtttctttctagtttttctactaatgtgtatctccttttattgtcttaccatttcttcctcaagttctaacatttctgctttatggtattctagttagagtgaattttattaatacatttttaattttatggcagagtatttgatcacagtttgaatctgcaccatgacatttttcatgtaattttacttttgctttttaaaagtactgtgttttaaaacatcttagttgaaataactctagatttgcagaaaagttataatactatgaagaattccatctaccctttatcccaattccccaaatgttaaccttttgccacacttgctgtctgtctatctatctatctaactactattttctgaatcaattaaaaataagttgtagacatgatgctgtatttcatgtaactacataaatatttatttcttcaaatgtaaaagcattttactgcataaccacaatgtaccaaaatcagaaaattaataggtaaaatgcttctttctacattgaacatattcacattttgccaattgtcccagtgatatattttataacaaaaaaataaataaatagtttatctggtccagggtccaatagaggattatgtgttgcatttagttgtcatgtctcttgattatctgacaatccagaacccatattcagtcttttctttcatgaccttgttatttttttgaagaatgaaagttagttaaattgtatcatacctcttatgtttagattcatctgatatttctttgtgattagattcagcttgttatgttctgaatattcatgtttgtgttcaccccccaaaattcatacattgaaacctaatcaccagtgtgatggtattagaaggtggggccttttgggaggtgatgaggttgttaggggacagccttcatgattgggatttatgctcttataaaagagactccagagagctaactagcgcttctaccatgtgaagacacagcaagaaggtgctgttttgttgtgttttgagacaggcccaactgtagcatcagctgactccatggggaagctctggatgaccctttagtcttgactggaagcagactctcaccagacaccaaatctattaacactttgatcatagacttcccaacctccagaaatgtgagaaacaaatttctgttgtttatacgctacccaatttaaggtttttagttatagcagcctgaatgaactaagtcacagcttaggcattcaggacagggatatgagagaagcgatgctgtgttcttctcattgtattaatactgcatcagtaaacatatggtgctgatttgtcccattactgatgataacacatttatcactcgtttaaagtgatatcttccaggtttctcaattgtaaagtttctgtttctctctttagtaagtattttggagggatatgtttttagactgtaaatatgttgttcctcagtaattatttacccattcatttcagcatccatccaaggttcttatctcaatatgttcttattatggctaccaaattgtaattttctcatttcatcattctttctacatttaacttgcatttggctggaagtaatagctttttctttcatatatatatattcatatatatacacacacacacgcatgtatgtacacacacaaacacacacatctccttatagatttctgtttatttaatgagtttatagtctattgttataattatttatcttgttgctctatttgctacgtatttggcaaacggggaaaccccccacctagaagctgaatactgtcttttactttttcccttcatattcttttgtttgagctcttcttttctggcacaagatcttccagggtctcactgtgttgcccaggctggagtacagtggtaccatcatggttcactgcagccactccctccctggactcgggtgattctcctgcctcagattccagagtagttgggacaacaggcacaccattatggccaactaatttttgtattttttttttgtagaaatggggttttgccatgttgcccaggctgttctcaaaccagtttatattattctttcatttctccaaggagctcttgttctacgttagagaagaatgatacttagaaaccaacattggagcactacgtctgctcactgctcctgggattaattgcttctaggctttcccaccaggcagaggtagaaaatgtctgtcactcacatacacaaacatttgtatctacttctgtatctatctgtctatctctgtctatctaagaaattgtgtgttcccagtgataattccaattgaaacataataccacagggatcattctggccattggcttttcatatttgtaactcatttatccaatagtgagaaacttggttctcattattctcaatttattcacttatttgctttttcctcctgtatataatcaaactcctgacccagaaagttgccttctaggccctgcccacctcaatagccccaatagtttccttggtcctaaagtttctacttgtgttagctgcctcaaaggacaggaagtaaaaagaattaatagatttttttaaagaagggggaaaaataagagacttttaaaaatagtatttcatttattattattattattattattattgttattattattatttttgagaaaagtcttgctttgttgcccaggctggagtgcagtggtacagtctcagctcacttcaacctctgcctcccaggttcaatttattctcctgcctcagcctcctgagtagctgggattacaggcacctgccaccacacccagctaatttttgtatttttaatagaaatggggttttgccatgctggcaaggctggtcttgaactcctcacctcaagtgattcagctgcctcagcctcccaaagtgctgtgattacaggcatgagcctggccaaaacagtaatttaaaaatggattctctccttttaaaatactacttatcattgaatgagttaggctttcctggactggccatttgtaagaggtttcttttgggatatgaaggaaagataaagtttctggctaagtaattttcatagagcaaaagctttctcctttcctgttacagagtcatgttacttcttataaatatgatttttctgtataattctttttatagccccaggccttcttaagaagaaagacatgacaactcaatccattcagtctttgtactaacggtcacaaaaaaggaatattactttttggcttcacagtatacccacactttcaggaagtatattttgcaagtgctttttgagatctatttttcagtggatccctgctcttgagatttatcaccagggattcttgttttcactgccctttctgtgtatacaaaaaaatgtcatgtgcttttgatagtgtttgatataaaatggagtctgggagttaaatatgcatccaagttcttcaaaaatagtttgcaaacttatgaaagcttcttcttgtagcttttgaataatttccaagaaaaagggaaaatgctgatttatagagtcattcaaattgtgtctaagtcctccaaaaatgtttttcaaacttataaaagcatcttcttgtagcttttgaataatttccaggagaaagaaaaggtgctgctttatatagttatgtttgtagttgtcacatgttggcttcttcaggaaggaggctctgagatgaagtttagcgtgaggatgtttattaaagtgtgcccttaccaaagagatcaatacaactggcagggagggaaagaaaacagtagtagtattatggtttggatgtttacctcttccaaatcttatgttgaaatatgattccaaatgttggaggtggggactggcgggaggtgattggatcatggagaaaggtccctcatgagtggtttagcaccatcctctcggtgatgagtgagtttcctttcagttcacacagagatctggttgttttgaatctgggacctctcccttctctctttcttgctctcattctcatcatgtggcatattggctaccctttgtcttccaccatgagtgtaagcttcctgagtgcctcagcagaagatgacagcactatgtttcgtgtacagcctgcagaaccataagccaattcaacctcttttatttataaattcctcagtctcagctatttctttatagctagcaaaaattgcctaatacaagtaggcagaggaagaagttgtgctgtgatacagcccagctttagcctcagctgaatccatagggaagctctagaactagaatgaccctttagagttgcctgaatggggctaagatcacccatcagtgattatgttagtggcagtgaatctatactggtctccagcaacctcagttcctgcctcctcagaagaaaaaatttgaggggcataaaggagaagaagagactgagacaagttttagagcaggagtgaaagtttattaaaaagctttacagcgggaagaaaagtacactaggaagaggcccaagcaggccacttgaaggacaagtgtggggtttgaccttttgacttggggttttatatcttgacatacttccatggtcttgcatcccttatctctttattctgcacttggagctgcctgttctcatgcacagtgtgttactggagttatacgcatgctcacttgaggcattcttctctttaccagtggaatgcttctggaaggtcatataccagttaaactccaccattttgcctcttaatgtgcatgcttgagctcactcacccaattcctgagatctttttgggaatcatctattattattttagagaggcagtgtgacaactgcctgaccatcacctgatggtcacctgacattcctgttggagttgggggagccctctcctcccccgctcatgcctggctagctacctactgtaaaaattagtcattaacgtaggcctctagaagggacgtgtggccttgggcaaaccaagtcttcctgaagaagtgaacagctgaaagatgtctgcagatagcactcctcactactggtgcaacaagtcatttcttgaaaataggttgtggaagcacatttcagtgtcctggtgcatagcctttgaatacacactcctctgagttatagttttgatctgatttcatagccatttatgactcaaaaatatcaagaatcactgcattattgggaacattcattatttctgtaccttgtttttatctagaaaactaaggttaatctagaaagatttgagctgaatttctaaagctactcggtaaaaataaatatgttgtttttacagtcagcaaattttctttagttatatgttagaattatgagtactgaaagccctttgtaattccactacattactaaaagctaagactcaccaactgtggattagttacgcagatatttcaaaaacacttggaggttttattcagaggcttaagccacacatctcagcgcttgagagggtagcctagaaccaagagggggcagcagagggccaccagaacagtgagggagaggtatgagaacatgtcagttgaaaggatactgattttagagagagaaatacatttatgtattcatgctaaacacagaaggaggagttatggcttaagaaaaattgattgtaagcatattgagagaatctctggttgttcgtgggtagtgttcatgggacaaaaactgagcagaggaaaagcaagtagaattcaggttatagggaagtcatgagcttcttagggaacgtgtgccttttagatctacgacctatggttacttcgggctctttatcactgataacattaagcactcagggaacaatatgggaccagcgatagcctcagtaatgtttccagatatatatttatattgcttttccactaattcctagaccagagtaatggacttaagagacattctttcaaagaaaatttttccccaaagaaccagtttttgcttttagtgatcaaactacattttcctctcagtttctagtttgacttattatttttataactctaacattttatgttttattttattgaagcatttgttctttttatatttttctgtaaagtaatttaagcataagaggttatgagtttgccccagtatagctttatcatatcttatatatattttaagagaaagagtttttttttttttaattttctcaatattctttactggaagctttggtttccttttaacccaataattatttaagacatgttttccattttccacaaaggcaagcctttttgtttaagccattgtcattaaattacagttttattacattttagtcagaagatatgacttttattacttctactctggcataaggttttgtgtcccagtagataattaatttctctttcatgaattattgaaaaggatatattttctattacaagttatctattgtctatctaaactcaacttcattaattaggttaattttagactttccaatattttccgaatttttaaaaagaaatccctttgaactgtcaaagcatgatgctatggtctgaatatctgtgtcccccctgcaaatctacatgttgaaacttaatcaccaatgttactgtgttaggagttaggacctttgggaagtgaatgagatcagtgctcttataaattggctccagagagctccttcgtccctttcaccatgtgaggacacagctagaagacaccatctgtgaaccagaaagtgagtccttatcagacactgaatctgctggcaccttgacttcttagccttcagaaatgtgagaattaaatttctgttgtttataagatacacaatttatgatatgttgttataacagcccaaacatatatgatgtattgaaatcttctatgaaaaattgtgtgattttcctcaatttcttcatgtttctaacagattttattttattatgcatatctgaagctgtgcttttcagcatataaatgtttattgttctataactttgatataggtagtgcctcataagtagtacctcttgtctgagagtctattttgttttcttccatgaccctgtgaactccaaggagttttctaaaatattttctgctttggtagtatgcaaaattcctaggcctgaaatttctttaattatctttacatgaggggtggtctagctagtccagtctttgccgacttaaccttggtcttcctctctgtaccttcactctagttatattgaattctggaccacagccagggaccacattgttcccactaatcctgttcttgcagtcatttatctactgtggctcttctggaaagaaacgggatcttctcccatcctctctgcttgctttattgcttgctttaaatatttaactattttattaagttgtccttaagagtcatgagacatatatgcccatgttaatatcaaataaaaattttgaaaaacctattagtaatttaaaatcaattactaaatcccactttatatacggccaagttaattccacacagaccttgaactttcttatttgagaacatgcttgattaattcaaattaaatccaaacaccaaaagttcagaaaacttgaaaggaatgctatggcattaaaaaactttcatttaatctttggaatagtaagaaaaatctgcttgctagtttggaagttgctagctctgagaccttaattgagccatctaacttttctggacttctatttacccttttctaaaacagtaggcattgggccaatggtacaatatggaacttcttcctggcaggtgttcagaagtatgtagggctgtttttgttgtcacagtaactgaagagtgctatggcacaagggtttaaaacatgagacagttttatactaaagagaattgtctcaacaaaatgccaaaaatacccccttgggaaatactggaagatgatcagcaagttttactaattttgtggttccagaacaggtggtgaaaaataatgggaaaaaaaattgcctttaagtaaatcttgaagatggcagacttagcactctcacacagagaaacagggtagagagtaaacacttgctcttcaagtgggtcatcaaagggatcgtttctggattcaccaaagaagcgacaggaaccaaaaagaacaaacagaagtgaagccaggcagcctcctactcagaactggtgtggagccagcggaagcctcctaatgtggagaaatgatgagggaatgagtgtccccagaggatccacacttcctccgtgaaccttgcaatcctgggcatgggagaacctccctgacaccttcactcctccaggccaatacagagagccacctggagtctttgcacaggcactgtttaagcccatgtgaagccccagaggacttggacccttggtgtcaacagttatagccctgctagaggatgcagccacagtgctgaggagtggccagactgccctgctatttcctgccaggcaggatctacagcttgggctcccagcacagtggccctgcccccaatccaaacattttggttggtgacagctcctcattcttctgagccaaaactctcagaggtaatagacaaggtttagcacctctgcatgccaccaatagcaaagtccaccctcttgggtgggagggaagtgcaagtgtatcacatgccctacagtctttactgctgcagctgagggggtcctgccttcctcggtggaaggcccatagcacagctgccctgcccccacctgaacatttcacctgtggtccagagcccttctgaaagcccaacccccacaggcctgtaatatcccctcagatcctctaccacttaagtgttccatctgcccctgcctgagagtttggttggtgatctggggaccaggccacccctccccatcacagccagcacttgacttctgggctagcccaaccctagtcctggcccttcaggagtcatatatgctatctagtgggccacctggggcctcggaactggggaaactacctaccccattccaactcagctggcatctggccgattcccccagtgtctgaggtcaagctgaccaaatcagccaataccaccacacaactcacttgcatgagtccaaatgtggagccacccctttataagaagcggaagtactctcacattggagaacaggagagccaggaagctatatgtatccggttgggtgacaagattataccctgaaaccacttccacagagagtggtgaaacaggtgtttcccatggctttcaaccatattgtggtccagagtggtccagctgctgcagcctctcccccacatggagactcatttccccagatgatcctcctagtcactcttgtcagagctggtgtttacacttgccatctctgtattcataggcaagcttggggctccagctcaacccagctgtgtcccccaacccccatgaaaagctcagggcaccaggtacttcactgtccagtccttcacccaagacaacagaaagcacctcatggtaaagaaagatcaggtacacaactacctgcttgtgctacagtgctcttacctgcaagtgctgtctactggcctgtaggtcaaaccacatggcatagtataaaatctgaagtgacagaagtgcaaagggctatagaagtaaagccaaaagaccctaaccaacacatttatctccagatttgaaagaactagtataagaattctggcaccatgaaaaatatgaatgttgcaacaccaccaaaggatcattcttttcagaaatggtctctaaccaaaatggaagctcagaaatgacagttaaagaattcaaagcatagatgtcaaggaaacttgatgaaatccaacacaagatttaaaatcaatacaaatacacttctaaagtaatccaggaaactaaggaaaagataaatcttctaaaaagaaatcaatcagagctcctggaattaaaaattgcttaagaaattctaaaatacaattgaaagttttatcagtagactaaaccaaagagaagagaggattttagagcttgaaaactattcttttaaactaatccagtcagacaaaaatttttaaaaattcaaaaaatgagcaaagtctccaagaaatatgagattacttaaagtgaccaagtctataaattattggcattcctaaaagataaggatacaaagtaaacctgaaaaatatatttaagggaataattcaagaaaattttcctaatcttgctagagatttcttatatccagatgcaagaaattcagagaatactttccagatactatacaaaatgaatgttattaaaggatatagtcaccagactgcctaaggtcaatgctaaagaaaaaacttgaaagatagctagagaaaaaggttagattacatgcaaaggcaaccgcatcaggctaaaagcagacctttcagcagaaacctttcaagcttgaagagattgggagcctattttcagcattctcaaagaaaagaaattccaatcaagaattttatatcctgccaaactaagcttcataagtgaaggataaataaaatcttgttcagacaagaaatcactaggggagtttgttacctctagaccagccttacaaaagattattcaggaagtttaaacatggaaacaaaaaacaatacctactaccataaaatcacacttaagtatatagcccacagaacctatacaacaactacacaatagcaactacaaagcaaccagctaacaactttatgatagaatcaaaacttcacattataatattagccatgaatgtaaatggtattcacaccctacttagaaggcaaagagcagcaagttggatagaaaagcaagacccattcatctgctgtcttcaagagactcagcccacatgtaacgacacccatagtctcaaagggttgaagaaagatctatcatgtaagtggaaaactaaaagagatcaggggtcattattcttagacaaaatagactttaaaacatcaacaataaaaaaagacaaagaagggcactacataatgataaagggtttaattgaacaagaagactgaactatcctaaatatatacataatcaacaatggagcacccaaattaataaaataagtacttccagacctatgaaaagacttagccacgcaattatagtgggggactttaccattccactgatggcattagacagatcatagaggaagaaaactaataagaaagtctgggcttaaattcaacacttgaccaactggacacaataggcatctacaggacactctacccatcaaccaaccacagaatatacattcttcttatctgcacatgaaacatactctcagatcgaccccatgctcagccataaagcaaatattaataaatttaaaaaatcaaaataataccaaccatacttttgggccacagtggaacaaaaatacaaatcactaccaagaaattctctcaaaaccacccaattacatggaaatgaaataacttgctcctgaatgctgtattcatctgtttttatgctgctgataaagacataactgagactaggcaatttacaaaagaaaggtgtattggacttacagttccacgtggcttgggaggcctcacaatcatggtagaaggtgtacagcacacctcatatggtggtggacaagggaagagagcttgcgcagggaaagtcccatttttaaaaccagtagatctcgtgagactcattcactatcaggaggacagtgcaggaaagacctgcccccataattcaatcaccactcaccaggttcctcccatgacatgtgggaatagtgggagttaccattcaagatgagatctgggtgtggacacagccaaaccatatcaaatgacttttgggtaaacaacaaaaataaggcaggaataaaatacttttttgaaataaaacagacacaacataccaaaatctctgggatgcagcaaaagcaatgttaagaggaaagtttatagcattaaatgcctacatcaagactttagaaggatttcaaagtaatgagctaacatcacatctagacaaactagaaaaacaagaacaaactacaaagccagtagaagaaaagaaataactaaaatcagaggagaactgaatgaaacgaagaggcaaaaatccttacaagggatcaatgaaatataaagtgagttctttaaacgaataaacaagattgatgaccactagctagattaacagagaagtgagagaagattcaactaagcttaatcagaaatgccaaaggcaacattagaactgatcttatggaaatacaaaagatcctcagagactattataaacacctctatgtatacaaattagaaaatctagaggaaatgaataaatgcctggaaacacacaatctcccaagactgaatgaggaacaaattgaaagcctgaactgaccaatatcaacttctaaaactgaatcagtaatttaaaaacctaccaaccaaaaagaaccctggatcagatggattcacagcctaattctaccagacatacaaagaagagttgctaccaatcctactaaaactattccaaaaaactgaggaacagggactcttctctaacacattgtacaaagcgagcatcactctgatattgaaatctgtcaaagaaacaaccaaaaacaaacttcatgtcaatatccctaatgaatataggcagaaaaattcctaataaaatactagtaaaccaaatccagcaccacatcaaaatttattcaccacatcaagtaggttttattcctagcagtcagggttggttgaatgtatgcaaattaataaatctgatttgccacataaacagaattaaaaacaaaaaccatatgattgtctcagtagacacagaaaaaatctcttgataaaatccagcatcccttcatgaaaagaacactcaacaaactagtcatcaaagaaacatatatcaaaatattgagagccatttatgagaaaccacagccaacatcatactgaatggacaaaagctggaagcattttccttaagaaatggaacaagacaaggatgcccactctcaccactcctattcaacgtagtactggaagtcctagccagagatatgagggaagagaatgaaataaaacgcatccaaataggaaaagaagaagccaaatttcatctctttttgctgatgatctaattctatacctagaaaaccctaaagacttcaccaaaagcctcctagaactgaaaagtgacttcagtaaagtttcaggatacaaaatttatgtacaaaaatcagtagcaataacatttaagtggagatccaactcaagaatgcaattccatttacaatagccacataaaaataaaatacctaagaatacatctaacaaaggaggtgaatgatatctacaaggaaaactatgaaacactgctgaaagaagttataaatgagacagacaaatggaaaaatattacatgcccatggattggaagaatcatattattaaaatggccatacttcccagagaaatctatggattcaatgctatttctatgaaactattcagcataaaatcagcatctttaatctattcagcattgatgtcattggctacccagtgagatattaaaaatagtgggaaaaaagtactcaacagggtttgaatttctaagtggtagagattatatcacattctttttttttatattaagtatccagtatatactaaatgctcagtagatattaataaaatagaattgtaacactgaggaagggaagagaagattgcttctacattctaacacttttctgtagataaatttttgtttgcattacatttacacagttagcacaaaaaacaatttcctttgagtcatttccaataatgctaaatataaacctttatgctgtgcagctaggagtttacacaaacaatgctgtccaagattgtctttagaatttttctgactgctccagaggattaagaacttacccctactcacaagcatagaatcctagatatggccaattcctagaaaacaagtaggcattgcattttcttagatatggagaaatttattttgcatgagttatatgttgtattagtttgttctacactgtgataagggcatacctgagactaggtaattcatggagaaaagaggcttaattaactcacagttctacaagctgcacaggaggcatggctggggaagactcaggaaatttgcaatcatggcagaaggtgaaggggaagcaggcacagtcttcatatagtagagcaggagagagagagcaaaggtggaagcactacatacttttaaacaaccagattttgtgagaactcattcactaccacaagaacagcaagaggaagtctgcccccatgattcaatcaccccccaccaggaccctctcccaacacgtggggattacaatttgacatgagatttgagtggggaccaagagtcaaaccatatcattctgcccccagcttctcccacatctcatgtccttctcacattccagaacacaatcatgacttcccaacagtcccctaaagtcttaactcattccaacattaacttaaaagtccaactccaaagtctcatttgagacaaagcaagtcctttctgcctatgaacctgtaatatcaaaatcaagttagttacttccaatatacagtggggctacaggcattgggtaaatgctctcattccaaaagggataaattggccaaaacaaaggggctacaggccctagtggaggttctctgtgatggctctgccactgcagcggacttctacctggacatccaagtgtttctatacatcctctgatatctaggaagaggcttccaaacctcaactctttccttctgtgcaccctcaggccaacaccacatggaaaccaccaaggcttgcagcttacagtgtttgaaacaatggctcgagcattactttggccccttttagcgatggctggagctggaatgcctgggatgcagggtgccatgtcctgaggctgcatagagcagtggggccctgagtctggcccatgaaaccatttttccctcctagacctccaggcctatgatggaaggggctaccaggaacgtctctgaaatgcgctgaaggcaatttcctcattgtcttggctattaacattcagctcttctgcagccttgaattcttcctcagaaaatggatttttctcctctactgcatagtcatgctgcaaattttccaaacttttgtgataagttctagtttcagttcatttctttgtttatgcaaataagcataggcttttagaagcagccaggccacttttttttttttttttttttaattttattttatttttttcgagatggagttttgctcttgtttcccaggctggagtgcaatggcacaatcttggctcattgcaacctctgcctccccagttcaagtgattctcttgcctcagcctcccaagtagctgggattacaggcctgcaccaccacacccagctaatttacacctggaatgtctatatcactatcagcattttggtccaaaaaaaattaacaagtctctaggaagttccaaactttccctcatctttctgtcttctgagctctccatactgttccaatttctgcccattacatagttccaaagttgcttccacattttcaggtatctttatagcaatgccttacttctctggtaccaattttctgtagtagtctatttttatgccactataaagacatacctgagcctgggtagtttatggagaaaaggggtttaattgactcacagttctgcaggctgtacaggaggcatggctggggaggactcagaaaatttacaatcagaagagggcaaaggggaaacaggcacaatcttcgtttggcagaacagaagagagagagagtgaagggggaagtgctacacacttttaaataatcagatcttgtgagactcattcactatcacaagagcagaaaggggaaagtctgcccccatgattcaatcacctcccactaggcccttcctcaacctgtggggattacaattccacatgatgtttggttggggacaaagagctaaaccacatcatgtgtcaaacatattttctttatatacatactgaatatagtaaattctagatattttggagatgaattctgcagctcatgaattatgtagatcctgttttttttctttcaaatctcagtaatttttcattgctaattacatattttccttgaaagagtcagtcaagagtagtgtcttagttagcttaggctgctataactatacactgcaaactgggtggtttaaacaacaagcatttatttctcacagttctggagcctgggaagtccaagatcaaagcatgggcagatttagtgtctggtgatggcctaattcctgcttcatatgcggtcttctctctgtgtcttcatgtagtgaaagagggaagtctctttcaagattcttttaaggacactaattctattcaggagggctccaccttaatgacctcatctaattctgattacccacgaaagaccccacttccaaatgccatcacattaggaggtaggatttcagtatataaatttgcaggggacatgaacattcagtacataacaggtagtgggtctctgaaatgttcatgtagcaattcttgtagagattcaaaagtcacagatgaagtagaaattatgcctaataattggcttatggattgcttgtaaatttatccaaatgctattattgttatggagagttgttattcaatgttaaaaatttatgtaaatatttctgtttattaaaactcaattcaaactggcttaagaaattaagaagagtttattttatatttcagcgtgactgagtccagggatttaaatgagctcttcaggattatctctttctctatcacttatctttcttcttttatgattatagtgtcattttcttccatgaccacaagcttccttcaggaaggatttatctcagcccagttagtatcccaaaagaaagagagggctagtttattttggggtattacaaggcaaagtgaataccctagcactggtcctattcattcctctcctgtttcccaggaccagagcaatggaggatcctggctggtgagacacagtgatttttaacacctcaccccccaggctagggtgtaaaacaattttccaaataaactggggactctgacaccaaataaaatgtaggagagaggaaaataatacaggagcaccaaaacaaatgaaacccaaagtggtttctgttatatttagtcaaacatgttcaactacattctagtttctggtaatgataatgaattgattccaatgcacttcatgaaagtttccccaaggattttctagggattaaaaacagataacaatacatatccttcagaaatatgctaatgagagatatattcatatgcatttttttcattgctggctcagtgttctgggcctatgtttgttgccttttgtggtagactttgcggtaatgataaatattttttttatgaggctttattactgttgtcaaatcttttgatcttaaggattatggctgaaaaactctaataatctgaattatttccttaaataaagtttttgcttctttctctttctggttcttccttattttagaatctttataatcaactaaatgcattttccttctgataaaataactcatttaactataaatttcaccacatcttagggactatgggccttgactacttgggaagaatatgcatttaatgaggcatgttttatttactgtgttccaaatggtacttataccattaggtgattagtgttcatctgctgagtgcagttgctcagaaaatgcaacccttcatttaagattccttggaacttgatgtcagtctctctgaatgcatattttctctgattttagcatgtttgttagaaatccctggatgctcagagatattttccatagcttgaacaatgatttagcacaaattgtgttgcattttctggctttaaacagttattttaaaaattaaaattttaccctgttatgtaatatttttcacatttctattgtattttgttatagacatccttatatagtttatctactgaaggataatcattttgcataactgtagtacataaaatgtgttggtttagaaatatgtaaagatttcaatgcagacacttttcaggtcatgtcctgttgtgggccagcctcaacaccatccgtagggtatccgaagtccggtggtaacaaaggaatgagaagagacaggttaagagttcttaaaggtgggagtcagggggccagttttaaaatggaggctgcaaaacgccccgagctctggtttctacttgatttattgagtacaatcacttagatctaagaagcagatgtttagggcaaaacagtgacagggaggcagtacgtcataggcgttatctatagtaatagtggtttaaatgaattttctttgtgttcaaacagtgtatctttatcggagagtagttggtgggagtgggcttaactaggagcctgtacgtctgtccacattttaatgttttaaaggagtatcttttttcttgaacacagtgtttacagataagagagcagatctcgctctgagcatgggaacatgatggcaattaggaggctttcctcctcagaggcctcttgtggctttccacaacttattgtcccatatttttatggccagtttatacaggcaccccacaagcccttttcccaacatgtcccccttttttcttttttaaaactgtcattgttattatggtttgtttgtggtgtctggtctctctccagaggtgtctttcgcatctgtagactaaaagtaaacagcataaatagatacacattaaagtaaaatttgtaatagttgatcctccagtggtcttaatttatttaagagggttttcgtttgaaagtccattagtagttttggtgagaatgtcagtctcaggcaggagagttgaatgaccctgagtccctttaaaaacctgttttattaatttgactaaatttaatattaattttttatccctttttttagatgatatttaacttttttaaaatgatgtttagtagtattatatgaatagggagttatgtagaaatcagaagtattttaatcacattgtatttgtaattgatgctttaagcttattatatgatctttcatttaaataacagtctatataagattatttatttgatttgttaattgttggtctgtttaggtctgagttccacaatttttgaggaatttttttgtcaattattgacatattttgtagtttgaatagaggagtgtaaagtaattccagcagccacagcagtagctgtgactgcaataaggcccataatgactgttataaggctaaaaataaatctttttgttttggtaaacacttttttttaacatttttgtgaccatatgaatggaaggagaggctttttaaggtctattgaggaaaactggtatccaaactttttttaaatctttaccagtaacacagatgttttttcaccaaatgtgaaatcaatacaggtgaaaaggtgacagttttgacaagtaatagtttgataattaggtcgaatattaatattttcaaacattaacataaaaggaggtttgacagaactttgggcaccgtttggtgggaagaaaactgatacacaaattgaagtctctcatcatttttttaaagattatatatatttttaaacccgaatatgagtttgggccatcattaacttccataatttgggaattatgtttagggcctattattggtttaattatttttggatgtgggccagccatactaaaattggcccaaattatgggaaactgggcatgttgtttagtgtaagtagtgtcatctttttgatagtatagtttttgtttcagtcctgtcatgtatttattattttgattggtacaattaactgtaaaggtccccttaggagaccaattaatgacgattttataggaattattttgtagtaccagtgtgattggagatgtaatttttttttttttttttttttttgagacggagtctcgctctgtggcccaggcgggagtgcagtggcgcaatctcggctcactgcaagctccgcctcccgggttcacgccattctcctgcctcagcctcccgagtagctgggactacaggcgcccaccatcacgcccggctaattttttttgtatttttagtagagacggggtttcaccgtgttagccaggatggtctcgatctcctgacctcgtgatccgcccgcctcggcctcccaaagtgctgggattacaagcatgagccaccgcgcccggccgtaattttttaaaattaatatttttaaattttttcaccattgttgaggctgttaatccctctttttggggggtttaaattgttttaattgaaccaaactttgtgaatgatctgggttctatttagaaaataaatgatagagtactggttttttattatgacctggaattttaacagtcaatgttgtcagtagtcttttaggcaactgatagttggccctatgtaaagagggggaactgataactcatggacacatttattaacatttacttcttctctgggtgagagggtttataagtatctgtaggctcaggcatctaaacactattattaacataaacctcaaccaggggttttaaccatgtaacaggcctaattaaaggcagaaatgggacatatatctaataggtataattttggtttgttgtagttacagggagacttaccgtcatagtaattaccgtattatagtcaccatcaggttacttgaagttagtgggttttgttgtgtctttaggtgttttttttgtaagttgggtccatcatttgatttgttttcaagctggtgggctcatttgatgggttttgttggtctttacctggttggctgaaatgtgtatttgagccatcaggcgtgttgggggcgggggtggaaatcttggcttaaaaatttttttttttttttggaattttgtttatggtagagtttaagatgttttgtaggtacccaaactggaagttgttttttttctggggaaatacaaacaaaccctctttcccgtgtaataacttttcctcttttttaggtctttgtttttgagttttttttaccacacaggtttttctttatgaacatttaccttttgtcctgttaaatgttgtttagttgttgtagtaacctgattttgggagatgtttaaaaaaatttaaggtaacaagagccaattgtaactgtatatgaggggtggaatatttttaatttttttaattttttgtttatgtaattgtatttttaagatttgattggcttgtttcacaattgtttgtccttgagaattatagggaatgcttgtgttgtgtttaatgttttattgttttaaaaatgtttggaaagatctgctacagtagtctggtccattgtctgtttttaatttttgtggaatttccatgatagtaaaacaggaaagtaagtgtctttttatatgtgttgtagtcttgctggtttggcaagtagtccatataaaataagaatatgtatttatggtcgcatggacataagaaagtttgccaaatgtaggaacgtgggtgacgtctgtttgtcagattatgttaggtgtcaaccctcaagggttaacaccagttttttgatgcggtagttgtagtacctggcactgaggacaatgttgtacaatgtccttggcctgattttacataatttgatatttgtttttaagtcctgttgtgttaaggtgtaaggtgtgttattgagtggaaactttgggcattagtaagtatgggggaaaccaacaagtcagcttgtttattagtcttagtcaagggtcctggaagattggtatgtgctcagatatgagttatatagaaaggaaaaccctgagtacgcacagctgtttgtaaagagttgaacaattgataaagctgtttaccaataatatatttaattaaggcagttttaatatgttgagtagcttgtacaacataagttgaatttgaaacaatattaactggctgattaaaattttttttttttagagacagagtcttgctctgtcgcccaggctggaatgcagtaacgccatctcgactcactgcaagctccgcctcctgggttcacgccattctcctgcctcagcgtcccgagtagctgggactacaggtgcccgccaccatgcccagctaatttttgtatttttagtagagacggggtttcaccgtgttagccaggatggtcttgatctcctgacctagtgatccgcccacctcagcctcccaaagtgctgggattacaggcgtgagccaccgcgcccggcctaaaattttttaatactgtaattactgtttgtaattcagctctttgggctgaggaaaagttagtgtggataactttatcacatggtcccatatatgtcgctttttcagtactagagccattagtaaaaacagttacagttccttttaaaggggcattaggagtaatttttggaagaacccatgtagttaattttaagaactggaaaattttatttaggataatgattattaatacatttaacaaattttgttaaattaacttgtcacgtaactgaattaataaatgcttgtttaacctgatttttatgtattggaactacaatcttattgggcttagtgccataaagtttaacaatttgtatatgagcctgtccaattaaaattgtctttttttttttttaagatggagtctcactctgttgcccaggctggagtccagtggtgcgatctcggctcactgcaagctctgcctcccaggtttgcgccattctcctgccttagcctcccgagtagctgggaccacagatgcccaccaccacacccagctaatttttttgtatttttagtagagacagggcttcaccatgttagccaggatggtgtcgatctcctgacctcgtgatctgcccacctcggcctcccaaagtgctgggattacaggtgtgagccaccacacccagcttaaaattgtcatttgatcaaatatactgtaagcatttttatggtattatgtggcaaaaaggaccacttaactaaatcatcattttgaataataacccccattgggtagtgggaagtagggaacactgtgaattgtaaaggcaagtctgagtcaatcctactgatctgggcttgttgagttttttttttttaattacttttaattcttttatggccttgggtgttagtttttttttactgtgcaagttgaaatttttttctcaatattgagaagagattagatatagtataagtagggatctttaagttgggctgaattcaattaatatcttctaacaatttttgaaaattatttaaggtttttaaagaatttttttaaatttgaaccttttgaggcttaatggctctattccgcacttgtattttcaaatactgaaaaggagtggttttttgaatttttttcaggtgttctaagcaatccagtgtttgtaattgtcttttgcaaagatgaataacattgaataagttggtttttattttttgttgtacacagtatgtcatccatataatgaatgatgtaacaatctggaaattgatttttaacagtctggatagctctgtctacaaaagtttgacaaattgtgggactgtttaacataccctgaggcaaaacttttcaatgatatctggctgtaggttttttgttattaacggcagggatgataatggtaaatttttcaaaacctgtctctgttaaaggaattgtaaaaaagtagtcttttaaatctataataacaagtggccagtctttagggatcatgatgggagatgggagctcgggttgtaaggctcccattggttgaattacagcgttgactgcttgcaagtcagtcagcatgtgccatctaccaaactttttaaattacaaatactggggaatttcaaggagagaaagtgggtgaaatatatccttttttttagtagtttaactattttatgaagtgtccccaatttttccttagggagcagccactgtttgacccagataaggtgctgggtcgggcctgaattgttccttcactgtaatgaatggcagggtgagcctgaatgcccccttttcataatgaactgtgggttgggcaataataggcgcagcaagccgagtcatggcgagccaagtcttgggctccctctcctagaaggtggccatttcggacatatctctgaaggagccatgggctgaacaattttttgagtaggtttagggagactggggggattggcagaaatcacctccggagtctcctttttgttagtacttagtagacgtggttcagggtcctgatcattagactcctttctctcctcctgtgactcaacctcatcatttgtctgaaaaggcaccagtgctgcatgcagcaatgaccaaactgaccaaacaggcaaaggaatttcctttccttttctatttgttttttaaggtcctcttcaactctttcccaattttttaatttcacagttctctgtttttggaaccaagcacaaaattgttccacagcataaaacaaatccataagattttccgtatcaacttttaccccaccacacttcaagagctgccatggcaagctcaaatatgtggtgtacttactttcagtttgtcccatttgtgtccctagctttctccgagtgccctgtttacctgcagagcttaaaacttttttgtcctcaggagtcctttgtccatcggtcctccatttcacacacttgagcgtttcttcactggattcttttgggtcccatgttgggtgacaaaatgttgggggcaccacccatagggtacccgaactctagtggtgacaaaggaatgagaagagacgggtcaagagttctttaaaatgggagccagggggccacttgtaaaatggaggctgcaaaaggcgccgagctctggtttccacagtatttattgagtacaatcacttagatctaagaagcagatgctcagggcgaaacagtgaaagggaggcagtacgtcataggcgtaatctacggtaatagtggtttaaatgaattttctttgtgttcaaacaatgtatctttaacttatcagagagtagttagtgggagcgggcttaactaggagcctgtacatctgtccacattttaatgttttaaaggagtgtctttttttcttgaacactgtgtttacagataagagagcggatctcactctgagcatgggaacatgatggcaattaggaggctttcctcctcagaggcctcttgtggctttccacaacttattgtcccatatttttagggcaagtttatacaggcaccccacagtcctttttcccaacaatgtcctaacctatttaaaattatagtggtatcctaacacaccagtacctcagaggactaaacttttaattcaagtaatataaaatgcattttattttgcacatgtttaaaaaataagaaaatgtcaatacttaaaataactaggttagtttcttcttgaaatagtcaagaatattcttgggatctgtggctgccattctccttagtgaacttctctttcattgctcattccataaatgttctcaactttctctcttttccctcttctcattttatatcagatattggaaattggtgactatacagaccaaatctggtctacagatagtgtattataatagtaattattattttttgtctctcgcaatacttggaaataaatggatttaacatttaacaatttggagattatatatgagatctgttttcagcttttttgaaaacctggactctctggaccatcttggctggcacttccacctgtccatagttagcttgagctgtgtaccagctgctcctttggacaatacatgctctgtcccttcacctaccactggctttggtatccttcgaacactgagtccaagtctcggttatcacttatcacactgagactgttgtttttcttatagtagaaaaatattccttgacatttaaaattagaaaatgaaagaccaagacagctatgtgtttaaaggaaaattagacatgtcaatgtcccaattgcccaagagggcaagtcaaccctcttctccctgaaagattcattcacttccttaagatttaaactaccatttttaatgtttataattctaaaatatatatctccctttcatagttttctcctaaacttcttagccatatatttgtatatatgtataggtgtgtatgtatatccaatttcttagtcagcatctctgtttgaatgtctcacagacactttaaccatgacatgcctgatgtggacacatcatcttattccctcgatttactcttccacctctgatctttctttgtggtagaccatattatcatcctcaattgctcattcttcccttccctgtaagaccattaatctacatccactgccatgtgcatacagtactagccttaagaggagcatactttcccacaccatttaggccaggctcagctacatgacttgttttgaccagtgaaatgtgagcagaattgacagtacaccagtctgaacagaagctttccgttgtgtagtttcaccagctctcttgcttttactctctaccttgagaactataaatcacaggtgagtgatgcttctgccaactggatcctggagtgaaagaacgactaaattgctggataaaatatttacatatatatatttatattcaatttcaacttttactttaaatacagggggtatatgtgcagctttgctacaagagtattgtgagtacattgtgtggtgttgaggtttggggtgtagatgtcatcacccaggttgtagtaaacatagtacccaaagggttgtttttcaccccgtgggcttctccttccctcccctgtctagtagttcacagtgtttattgtcccgatctttagttccacgtgggctcaatgtttagcttccaattacaagtgagatcgtgcaatatttggttttctgttcttgtgttaatttccttgggattatggcctccagctgtatctatgttgctgcaaaggacatgacttcgttctttttaaatagctgcatagtattgcatagtgtatatgcaccacattttctttatccgtagataaaatatttttaaatgtataattataaggaaagtgagggaacttcactaagacctgaagcaataagaaactgtgaatctctttctaggtcagtgctgaagtcagcatttgcactaacagcatctgctcatccttggtgatttaaagtttcatattttggtggactgataatcacagacaggaacacttgggctcctgtgcaaggtgagagactggagcaagactcagaggcaaatccaggaattctaaaaggaacagattccagggatgaattctcttattcaggaaaatggagagaataagaatgcttgcctttttttggctttggccatgagtacacagggaaaaaaaaattctttctttgagaattctcagtatgctttccttttggtttggggtcacattccctgtatgcctggaaaaaaacccatgccacaaatttatgtaaaagtggtcctgggctagtagtacacacaggttcctggcattttagcaaactcaaattctctatggtggtacatgcttgaaactcaggccacaaagaagtcatactgataaagtttagagaaacgtgagttcacaaaaatatttgaaaagcacttggaaaaacaagctaccgctggcaaaatttagcagaacaacaaaatgaagaatcagattcacaaagtggcatatatttgaatgtttaaagacaatacaaaataagggtttaaaatatttatcagaatataagaggatagcttcagggccttgaccagtctcctttccatagataccaagataggaaatattgctttagagagtagtgggtttttttgtttttgtttttgtttctcaagtccttttattattcatttttaacaacagcccagggatagggaaccaggggaagtggaaaggggagaagggagcccctacaacccctcccaactcaccccttcccctattatgtatttataatctatatgtaagccccaggggtgagaggaaaagggaactccctcactggagtggggtaacccatagagtgaagttatatttaggctttgagtgacattcattctatgcttctgtgcctgaggtctttgcaagagtaaatggtacagtttgggtgtgattttttctctcttggtgtgcttatagcgataaactaacagtaaaactattttacttttacagctggtattagtgtagtttcttataaattcatattttttgggggaagaaagagtaacgcacttaagtggacattaactcataaaatattcaaccctattacacaatactaaataattttccattttctgaactataatttcatgataaaactctggatttgaaccgtttattccaggtataaataaacaataaaatacaaaaatgtgttttaaaattatctttcttctgtttctgacttcttcaagctcaataaatattaaacattaagagttgtcacttgcaaagaatgaaacattttaaatgaccagcttaattttaaaaaatactttataatttataaaacagaagctcattttcattagaaaaattttattagttcagattcacacaagtttaagtataaataagagaaagttaggattaaataatacttgagaataaaggcaaagtcttctcacatttttaaatacaacacaaacttgaagaacaaagcatttattaagagatccttgagaaattactttaagaacagataagacagattagcaggtaccccatgtacatgagtgcctctatagtttgttcatttagataagtcaaaaattctcacttgagatcttgtttattaattaaaatattagtaaactatttcttcatgagttgtttgtttgtttgtttttgagatggagtcttactctgtcactaggctggagtacagtggcgtgatcttggttcactgcaacctgtgcctcctgggttcaagctattctcctgccttagcctcccgggtagctgggactacaggctcgcaccaccacgccctgctaatttttgtattttggtagagacagggtttcaccatgttcaccaggatgttctccatctcttgaccttgtgatctgccctcctcggcctcccaaagtgttgggattacaggcgtgaaccaccacgcccggcctcttcatgagtttttaatgattcctggctcatatttgaagtcaatgtcagctaaaaaagctataataactaatgggtttctcacagaatctactatcatacaatttagtgtcctgcaatagaaagtataaatctcaaagagcacacacgtaactacttgagcagaggagtgagccagtatctggcttcctggaagactgtactgtaagtatggagctgtcttctcttttggtcttctgcttctctcatcattcaggtgaattcactcatcctcaccttcaggcttcagatctgcttcttgggggactggtttttgctttaatataactccataggagacctaaaggtaaatcaaagagttggctttcagttccctgcgcctcttgcatgctcctcttttatggttgtgatcactaatgctcagtcacttgttcgagttcttgccttcaacttccaagacctttgttgcctactgttaagatgacttcttgggtaatcaatatgttctccttgtccttgtcaatatttactaggtgactaatcctatagaccttgcctgtgttcccagttctgattactctgctggagacttccaagttggcctgcttagctgtatcatctctcattcagatctgacgtatagcaggagccagattgactgaaactgaggggttacataaaattcagcattaagtaggacagatgagtattagaaagcagaagaggtcccaccacataaggcaatactaaaacaagtattgagattgggagcattcaaggaataaattagggagaagagacacggagcaatggaaaagtgagagattttggttaaatatggacatattggaagcttttgcctggtcttccagggatatttgcaacatgtggcatttaaaagctggggtgagcaggtacccaattctaattctgtgctgataacctcctcccacccatagtgtgggaatggtgcatgtgccctggccatgtatggatcatttgaatcactatttagtgaattatgtcttagaatctcagctttttagaggttaaatggtctttaaaaatattccatcacggattatgtttctgtttttttgttgttgttcactttttattgaaaatatgcattcagaaaagcatacaaataaatgtacaatttctggaatttttatactgaacacattctaatcaccattcaagtcaagttatagaatgttttcagtaccctagaagcttcccttgtactcaccttcaggcattattcaaccccacaggtaactaatattttgacttatattaaagagacttttaaaaatattgttcttttataagtctaatgcttttaggaaatgtttaaatattaaacaaatattcccctaagcacttactgtgcactaaacgatagggattttaaaaagaataaaatgtcacctttgccttctaaaaagatgagctgaaaatgttttctgcgaaagtccagagggaaaatattttagactgcttgggccacatggtctttctcataattattcagagacatcagtctaaagtgttgtctaacccttctcctgtttgccttgagaatactcactggtggcacttacagctgcagcatttgctcctagataactttgctacgaaatatctggcttttattattattttcactttgtctatgtatattgactttggaaacaaaagacataattctatttatggcattctgtttttagtagtggcatttccatttacaaaatacagtaattcttgatcactgaatgtgtcaaatcctagaaaacatagcattcctacatgtgatattaacatcattctcaaacagatattggcccaagaatcatttgatgaatccgatttttccaaaataggtgattctgatgttagttctgtttataaataactccaaaaatagtttttatattttattttcaccttaaaattagtcatatttgcttcagcctcaaagagcatgttcatgtaaaattaaatgagtgctggcagtgagctgcactttttttttctcaacaggtaaagggttaaaagcaaccccagaaatgaataaatgtggctgtgtcccaataaaactttatttatggaaactgaaatttgaattttatataatttttacatgctatgaaatgttcttctttgagcttatttgcccaaccatttaaaaatgtaaaagttactcttagcttcttggttgtacaaatgcaggcagtgggctgtatttggactgtgggcctagattaccaaccctgctttaagagttcaagatttaaggtaatctagaaggggatagaagaaaataagcagatactctaattttaaacactacattaagtctttttagagtggtaccttcacagttttattggagttcattagtgagagggactgactctatccaagtgtgttggggaagatttcatgaaacaaaatgagggagcagcaccctgctttagctgtaggttgtcaggacctctctggagaggaacgatttgagctgagaactgaagggtgaggcagagtggcaatgggagagctggaggtcacgccttccaagcaggaggtaaagcacatgagaaggtgctgagagggcctctggcacatgggagaggaggagtgcctagtgggtgtcaggcattcaataaatgtacctattgttataaccatcatgaccccttttagaccgagaaactaaggagtgaagaagaattaagtccatgaggctcacattcattaagacaaatatattttatttatgcatcatatgctattcattttatttttaaagtatctgttaaaatacactcaaatacaaagatattttaaaaattggtcattcagacgcagactgagcaccacatgctgaccactttactgtacttttcattgtaagatgaaatagaaagatgcctcactttggggaatgtaccatctagaggaagaagaaaatgctataatacaagtatgagcacttattgggttggaagagccaaatttgggggagataagatgttttaggctaggggtaccagtccgtgggctactaggaaccagactgcacagcaggaggtgaatggctgtgggtgagcaagcgttactgcctgagctctgcctcctgtcagatcagcagctcctagagtctcataggacagtgaacattgtgaactgtgcatgtgagggatctagcttgtgccttcttatgagattctaatgcctgatgatctgtcactgtctcccatcacccccagatgagactgtctagttgcaggaaaacaagctcagggctcccactgatcctatattatgatgagttgtataattgtttcattatatgttacaatgtaataataatataaataaagtgcacaataaatgtaatgcacttgcatcatcccaaaaccaccccccacatcccccacctccgtctgtggaaaaattttcttccatgaaacttgtccctggtgtcaaaaaggttggagaccactgttttaggttatacagccatacaaagcaagctgtaatgaattaataaaaatctttttctattccaaggcaagaggaaagaatgatgggttaaaacatagccctcactaactaataaacagcaaaatacaatttcactagtagagatgcctttttccttactctgtaagttaaaagtgatacaaggttttatcttgttttatgttttcctgaatctttctattaaagactcacattcatggagtgacagcataataaatgttgtcctcaaaaacacttttctcagagccattggataaagagacatttctaatcccaatcctagatggaaacagaggacatcacattagtggggctttacacccactgtggtccagatacaataccctaatcttttcttcctccagcttttcactgaactgttggcatttttctcatttatcatgtagtttcccaccttccaagattccctctagggtgccattcattattgccaaataatcttaatatttccagttatgttatagttatccattgagactgagttcaggcatcaattcccagaagcattccctaaaaatccatactgagccttttagcctgctttgtttggcactgtatctgtaccacattactgtacttgctatattatgttgaaattatcagcatattggtcaatttgatatatttcctgcaaactagattataagctcctagaagaaaagagccatgcatttttgttaattgtcatatatctggcacttagaagagtaggtacacattaaatatttactgatactctaagtttgataagcctttggagtaacaaacctgagttacacaagctgattttgttgcattctgatgatctgacttgataaagggatttaacacaataaatcatgaatgcgtctccttagaagaggcctcttccatatcaagagtgtctatttaccataggtctattctgcagatggtataaaattgagataattggcacacatctaagttcacatgtttgtgtttttctcatctggcttatactcctgtggtgattcttctcctctagggaaagtcattatttcctcttcttaagctctctctgtaaatgtgtggtgtgggctgaaagtttatgttcccaccccccccccaccaaatttatattagtttgatgcaaacaaattgtggtttcagaccgtgaattttaaattattataactaagctcaaacacgtctttgttaattaaagtagggaccattacaatcaacacattttttgccaatgagaaataagtttatttagtcctgtagcataaaaattcatgctttgggatttgatgaactcttggagagcattttctgcatcctactggttgtggaagcattttccctgcaaaaagttgttgaaatgcttgaagaagtgatagtcagttggcgagacatcaggtgagtatgacggatgaggcaaaactttgtggcagaatttcttcaacttttgaagcactggttgtgggatatgcagtctggcattttcgtggagaagaattgggccctatctgttgaccaatgctggcttcaggtgttgcagtttttggtgcatctcatcgatttgctgagcatacctctcatatgtaatggttttgctgggattcggaaaacttagtggatcggactggccgcaggccaccaaacagtaaccatgacctttttttggtgcaagtttggctttgggaagtgatttggagcttcttcttggtccaaccactgagtttgtcattgccagttgttgtataaaattcactttttgtcacacgacacaatctgattgagaaatggttcactgttgttgtgtagaataagaagatgacatttcaggccaggtgtggtggctcacacctgtaatcttagcactttgggaggctgaggcaggcagatcacgaggtcaggagatcgagaccatcctggctaacacggtgaaacgctgtctttactaaaaatacaaaaaattagctgggcgtggtggtgggcgcctgtagtcccagctactcaggaggctgaggcaggagaatggcatgaacacaggaggcggagcttgcagtgagctgagatcaggccactgcactccagcctgggtgacagagcgagactccacctcaataaaaataataataataataaaagaagatgacatttcaaaatgacgatatgtttgattttccatcagctcctgaggcacccacttatctagctttttcactttttttatttgcttcaaatgccaaatgaccatagaatggtcaacattgagttctttggcaacttcttgtgcagttgtaagaggatcagctttgatgattgctcttagtccttgtcaatttccgatggctggccactacggtcctcatcttcaaggctctcgtctcctttgcaaaacttgaactgccactgcactgaacattcattagcagttcctgggccaaatgcattgttgatgttgtgagttgtctctgctgctttatgacccatttcaaactcaaacaaaaaaatcacttgaatttgctttttgtctaacatcatttccatattctaaaataaacatgaacagcaagtaataagtcattagcaaaaaaaaaacataaagcgagaaatgcacattaaaatgatgtacaaataagcacatttatttaagaatgtattctaatatcaaacggcaaatttaaacagtgcaaaaactgtaattacttttgcactggcagtgagaatttcaagccagtggatcttagcttgttgggctctgtcggggtgggatccactgagcaagaccactcagccccctggcttcagccccctttccaggggagtgaatggttttgtctcacaggcattccaggcaccactggggtacaagaaaaccaaaacaaacaacaacaacaaaaaacaacaaaaaaactcctgcagctagctcagtgtctcagtgtctgcccaaacagccatccagctttgtgcttgaagctcagggccctggtggtgtaggcaccagagggaatctcctggtctgtgggttgcaaagacagtgggaaaagtgtagtatctgggctggatagctctgtccctcatggcttcccttggctagtggagggagtttccccaaccccttttgcttcccgggtgaggcaatgccccaccctgcttctgctcaccctccgtgggctgcacccactgtctaaccagttccagtgagatgagccaggtatctcagttggaaatgcagaaatcccttgccttctgcattgatctcgctgggagctgcagactggagctattcctgtttggacatcttgcctggagatagcatttttatattatagaatcatgtcatctgaggacagagaacttcattaattgaatacatttaataatttactttttcccccaatttggatatctttcattgtttgttttgactaagggctctggttaggacatccaatactatgttgtataaaacagtgagactgggcatccttgtctctttgttctaatcttaaatgaaaaacttcagttttcactattaagtataatgttagctgtgggcttctcataaatggcctttattatgttgaggcagtttctttgttcctgtgttgctaagtgttttttaaaattattattattatgagagtttgttgaatcttgtcagatgctttttctgcaattgagataatcatgttgttttgtccttcattctgttaatgaagtgtattacattaatctatttctgtgtgttaaattatccttgcattccaggaataaatcctacttgttcatggttgatatggtttggctgtgtccccacgcaaatcttgtcttgaattctagttcccataatccccacacgttgtgggagggacccagtgggaagtacttgaatcacagaggtgggattttttttgtgctgttctcatgatagttaataagtctcatgagatctgatgggtttaaaaagggaagttcttgggaggctgaggcaggtggctcacctgaggtcaggaattcaagaccagcctggtcaacatggtgaaaacccatctctactaaaaatacaaaaattagtggggcatggtggtgggtgcctgtaactctagctacttgggaggctgaggtaggagaattgcttgaacttgggagatgaaggttgcggtgagctgagatcaagccactgcactccagcatgggcaacacagtgaaactcggtatcaagaaaaaaaaaaaaggatgttcccctgcacaagctctctttcctgccgccatgtaagatgtgcctttgcttctccttcgccttctgccacaattgtgaggcctccccagccatgtgaaactgtgagtccattaaacctctttttctttataaattacccagtctcaagtgtttcttcatagcagtatgaaaattgaccagtacagtggtgtataccccttttaatgtgctgttaaacttggtttgctaatattaatattttgttgatttttgaatcaatattcatcagggatattgatctatagatttcttcttctttcttctctcttcttccttcttccttctcctcctccttcctcctcctccccctcctcctcttgcccttcctcctcctcctcttcatcctcctcttcttctttcttcttcctcctcctccccctcctcctcttcctcatcctccttctttttcttttcctcttcctcctcctccttcttgttcttccttctcctcctcatcctctttctttttcttttcctcttcctcctcctccttcttcttcttcctcctcctcctcctcctctttttcttctcctcctcctccttccttttcttctccttcctcttctgcttttgctgcttcttcttcattgtcatcgtcatcgtagttgtctgtagtgcctttgtctggctttggtatcaggtaatgcctcatagaagaatcttggaagttccctcctcttcaattttttggaaaagttttaaaagaattgatgttacatctttaaatgttttgtagaattctccagtgaagccatcttttcctgggcttctctttattaggaggtttttgattactgattcaatctctttactttttattggcctgttcagattttctatttcttcatgagtcagtcttagtagtttttatatgtctaggaatttatccatttcttttaggatattcaattttttggtatgtacttgcttatgttattcttttacaattttaaatatgtgtggcatcagttgtaatatcccctctttgtttctgattttagttgtctttcttttttttaacataatctgcttaagaggctttccatttttttgatcttttgtaaaacattttttcgttttgttgatttttttccttttgtttgcctattcttgctttatttatctctgctctaatttttattatttttttccttctgctaattttgggctcagtttttttcccctagtttccttaggtgcagtgttaggttgttaattttttttttaaatgtatgcatttacagatataatcttctctcttagcactgctttcactgcattacataaattttggtatgttgtatttttattttcctctgttacaaggtattatataatttcctttgttacttcttctttgacccataggttatttaagagtccactgtttagctttcacatatttgtagattttttagtttaccttgtgctttttatttacagtttcattctattgtgattgaaaaaatactttgtatgatttcagtaaacttgaaattgttgaagatttgttttatggcccattaaagcttcattttctgccttaatatgtagtctatctgggggaatgttctatgtgcacttgagaagaatgtatattctgctgctgttgggtggaatgttctgtatatgtctgttaggtccaattggtttatacagacataccttggagatattgtgggttcaatcacagaccacaagatcacaacgaagcaagtcacagatgttttggtttcacagcacatatgttatgttaacactatactatagtcaaatgtgcaataatattatttctaaaaagatgtacatactttaattaaaaaatactctatggctaaaaaatgctgatgattatctgagcctttagtgatttataatatttttgcttgtggagggtcttgcctttatgttgatggttgctgactgatcagggtggtggttgctgaaggttgaagtggctgtggcaatttgttaaactaagacaacagtaaaatttgctatctcaattgactctttctttcataaaatatttccctgtagcatgcaatgcttcttgatagcattttaccctatagtagaattctcttaaaattgaagtcaaatctctgcaatgttgctactgatttatcaactatgtttatgtaattttctaagttctttgttgtcatttcagtaatgttcatagcatctgcaccaggaatagactccatctcagggaactactttttatgctcattccttaaaagcaactcttcatcattcaagtttgataatgaaattttagcaattctgccacctcttttgattccacttctaattttgttctcttgctatttttaccacttttttagttatttcctctgctgaagtcttgaacctttcaaagttatccataagagctggaatgaacttttgaaaatttcttttaatgttgacatcttgaactcttcccgtgaattacaaacgttcttaatagcatctagactggtgaattctttccagaagggtttaaatttactttgcccagatccatcaaatgaatcattctttatggcagctatagccttataaatgtattttttaaataataagatttaaatgttgaaattaccccttgatctatgagttgcagaatggatgttgtgttagtaggcacaaaaacaacattaatttccctggatatccccataaaagctcttagatgactaggagtattgtcaatgaacagtaatattttaaaacaaaatctttttctttgatcagtgggtctcaacaatggacttaaaatattcaataagccatgctgtcagtgaatgtgctgttatctaggctttgttgtttcatttatagagcacaagcagagtagatttggcataattcttaaggttctaggatttttcagaatggtaataattttgcaaaatggattttcaagtggtaaatgagcatttgtttctagctaaagttaccagctgtgttaacacctaattagagagtcatcctcattgtaagagtcagtgattttctccttagctctgaaagtggtagatgacatcttcttccaatataaggttgttttgtctacattaaaaatctgttgctaagtgtaaccacctgaattaatgatcttggctacgtcttctggataacttgctacagttactacaaaagtaattgctgctccatcttgcacttttatgttatggagttaatttctttccttcaacctcatgaaccaaactctactagctcccagcttttcttctgcagtttcctcacctctcttagccttcgtaaaattgaagagagtgaggatcttgctcttgattagctttggtttaagggagtgttctggcttgtttgaactattcagaccactcaaactgttttcctttcagtaagaaggctgttttcctttcttattattcatgtgttcactagagtagcacttttcgttttttataagaattttttttttgtttttgcattcacaacttgctaactggtacaagaggaccagcttttgccctgtctcagctttggacatgcttttccattaagcttaatcatttgtaggttttgatttcaaagcagatatgtgcaaatttttctttatttgaacacttagatgccatggcaggatttctattgacctaatttcgttatttttgtgtctctgagaatatggagatccaaggggatgaagagagataagggattaactggtcagcagagcagtcagaacatatacaacatttatcaatcagtttcactgttttatatgggaatggtttgtggggcctcaaataaattataatagtaacatcaaagatcactgaccacagatcaccctacagatataataataatgatgataaaggttgaaatattgtgagaattactaaaatgtgacatgaggcacaaggtgagcacatactgtaagaaaaatggtttcaataggtttgcttgatgcgaggttgccacaaaccttcaatttgtaagaaacacaatatttgtgaagcaaaataaagcaaactgtaataaaatgaagtacatctgtgttatttaaatcccctgttttcttattgatattctgtctggttattctattcactattgaaagtattgaagtctcctactactattttgctgttatttctcactccaattgtgtcaaagtttgcttcgtatatttttatttggaaacttggatatttggtgcataaatacttatgattattatgtctttctggaaaagttactcttttatcattctaaatgcccttcttagtctcttataacagtttttgatttgaaggctgttttgtctactataccaatattaggcactagtatagccactcctgctgtttttgattgccatttgcatggagtatcttttcctatcttttcattttcatcttacatgtgttcttagatgtaaagtgagtatcttttagaaagcagatagctgggtcctatgttttttatccattcagtcaatctctgttctttgattggacagtgtcttagtaagctcaggctgataaaacaaaataccatagactggatggcttaagcaatacaaattcatttctcacagttctggaggctgggaagtcagagatcaaggtccctgcatggttagggtctgatgaaggccctttttctggcttgcagacggctgccatcttgctgtatcctcacatgatagagaaagaaggagctctaatattttcctcttcttataagaacgttaatctgtgggccaagtgtggtggctcatgcctataatcctagcactttgggaagccaaggtgggaggatcagttgagatcaggagttcaagattagcttgggcaacatagcaagacctcgtctctacaaaaaataaaataactagctgggcatggtggcacatgcttgtagtcctagctacttgggagaccaaacttaggattttgaggctgcagtgagccatggtcatactgattgcactctaacctgggtgacagagtaagaccttatttctttaaaaaagagaaaagagaaaaaatggaaaaaaagacacaattctcatgacctcatctaaacctaattacctcaaatgatcacaccgctaactactgtcacatttgggactagggcttcatgtgaattttagggtaacacaaacattctgtgtataacagacagttgattctatttacatttaaagtaattactgatgataaaagaattacaattgccattttgttaactgttgtttgtatatcttacagcttctctgtttctcctttctctctgcttttgtgttttgttgatcttctgtaatgatgtgctttgatttacttcttatttccttttggatatattacatagatattttctttgtggttttcattgcaattacgtaaaacatcttaagttatagcattttattttaaacagataacaagtacgtttaacacacacaacaaccctacttcttaacagttccacctcccctactttatgttgttgaggttacaatttacattttcattttcatatattgtattctcactaatatgactttatagcttttgaatttttgtcatttaagttttatgcatcaaaattacaataatacaagtcacgatatttgtctataaatttacctttacgagagtaccttatattttcacatcgtgtcaaatggctgtctactatccttttgtttcaacttgaagggcacctgttagttaacctttcttgtagagcaggtcgagtggtaatgaactccctcaccttttgcttggtctgggaaaatcttaatttctcattcatttttgaaggatgggatgtttttgctggatacagtatttattgatgatagttttgttttcctttctacactttgaatgaattattctacttccttctagcctgcaaagtttctgctgagaaatcccctgataatcttatggaaactcctttatatgtgatgaatctcttttttcctttctgtgttcaagattctttgtctttggctttaaacagtttgattataagatacatctgtgttgttctcttgggatttacattggttggagttttttcagcttcttgaatccacatgtccgtttctttcttcagatctgggctattttcagccattattttttcaaataagctctctcccccttctttctctcctctcctcctagtattctcatatgtatatattggtccacttaatagtgtcccataggctcttttcacttttctttactcttttttatgtttgattctctgattcaatcatctcaactgacttgtcttcaagtttgctcattatttcatcttagtgataaagtttgctgtttcattctttaaaatacatttttagtttaattgttgaaattttcagctccagaatttctgtgtttaaaaaaaatagtttccattgacttgtccatattctaattttggtcacagattgtttttggttttgtttagtcatttatctgtattctcttttagctcattgagtatttttatgatagttattttaaattcatttttagacagctcacagatttatgtttctttaggattagtttctggagtttgttcctttgattgtgccatgttttttctttgtatgccttgtaatttgtttgtttgtttgctgggatttgggaatttgaaaaaacaaccaccctctcccagttatgtactgccttcaagcagggaagactttgcctatgagcctagctagaagtgaaagagcttcaaaccttttatgatctctggctctctctggtgtttttctgaggaactgcagcctaacatgctactagcctctgttttcagcagcttctaaactctcccagtcaggtgagaaagagatcagtccccaagacagctctcagataaaccagaacattggaaacgtggtcaactctcctgtttttggcaaaagccccaatatgggagaggagttctttctaattgttctgcaatatgccatttagtgggagacacatgaacagacacatcaaatgctgcaaatttccttacttctttctttgaaatcctgtcttggttttacaatggcttacttaagtgatgtatctactcaatttgcctctgtggttctcacaggatattctgttattgtcaactcagtgtctatgagggaaggagaacttttagctttctagtctgccatcttgctgaaatgaccttaagagtgggtgactttaaaatatcatacgtgtataggaaaaaggctgaacattgtaagggagctatacaaaaattgaattattgcctctttaatatcacaaaagaaaatatgtatgtgaaattttttgaaaacatgggaattctctgtaaatacaaaattagtttctgctgccccgtcatgtccacatgtgcagatgaaccctttagagattgaaaaatatgctatcactattgctggattgttctatgacaagagaaaagtttggaagttcaggcacacaaagagtaacagaaagagggcattaactagatgatttcatcattgtagttacctataaatctacttcattatacagggaagaaagcttcatatatcctaaactgatttatcaaatccagactcaattttcctgtttttatctgaaaaccactacttgtggacacttgaacttgttggttctttaaatgttctttatccttctgcctgggatacagcataattgcttcaatttcctatgctgccttctcctggttaattcctactcagcttttgagacccatcccaggtgtctccacctccttccactccccacctttcacttctggtaagggtttcctaactatgagctagatgcaccttctattttcccagggatagcacattgttctctaattgtctatattcttatttctttcaaatactagactgtgaattgcttaaggctgggaatttataccgttaatctttgtggctttagcactcagcattgtgcttggcacaaagtagcttaataattgttgaatgaatgtaggcaaaaagacagatctgagtttaaatcctggctgttccacttgccagctctatgatgcaatgttacttgacttttgtgtagctctatgatacagacttaccacattttcagtcctttagttttctcatctctaaaattagcttgacgcctccataaatgtttgctgtgaggatcaaatgagagcttcagtgtagaacatttatgcagcctcatagataataaacaggcagtaaatggtagctataatgtagcttgttatccttaaattgcagataacaattaactaaggtgaaatgagaaaaataaagtatctacatgcttccacctagtttaatcaacatactccaagatggggaactaagtaattaattccaaatgtgtatctttcagcaaattagttctctatcactcttttgtttatttaatactttattaaatggttacatttttagcagcttccttttttataacaacctttttattgtggtaaaatacacaaaacaaaaattgcctttttaaacttttttttaagcagacaagtcattagcattaggtgcattaacattgttgtgtaatcatcaccactatccatctccagaatgaaattctgtactcattaaagagtaactcctcattttcccattctcctccagctcctggcaaccactattctaccttctttatctgtgaatttgactatcctatatatcccatatagatggattcaaatagtatttgtttgtgagtagtttattttgcctaccataatgttttaaaggtttatccatgctgtagcgtgtgttaatcccttcctttttcatggctggataatatcccattgtatttacataccatattttgtttatccacccatcctttgacagacatttgggttatttctattcttttggctactatgaataatgttgggtgcacgaatatctcttcaagaccctgctataaattcttttgagtatatacccagaaataatgggatcaccgaatcacatgttcatcctgttttgatttgcatatctctaatgactagtgatcttgaacatcttttcatatgtttgttggacatttgtgtattttctttggggaaatatctattcaagtcctttgcccagtttttagttgctttttttgagttgtagcagttctttatatatttgggtattaacactgtagcaaatatatgatctcctgcaggctgccttttcactctcctgatagtgtcctttgatgcacaaaactttttatttatttatttatttatttatttatttatttatttatgagaaagagtcttggtctgtcgcccagactggagtgcagtggcatgatcttggctcattgcaacctctgcttctgggtcataaggaatccttccacctcagcctcccaattagctgggactataggcgtataccaccgtgcctagctaatttgtgtattttttgtagaaatggggtcttgctatgttgcccaggcttgtgtcaaactcctgggctcaagcccaccttggccttccacttggccgaccactgtggccagcccttatttaatttttaaatgtacaccatcaataccaatttctgatctaagtaatgtatataaaataagtacttggcaaagaaaagaaatgattttctctattgtctcacactataatgcattttctttttcagagtgtaggagacttcatgtactgttttatttgtagaattttcttgcttatgttttaaaatcaatgcgagaacaactttattttgaggtgagtttattttgaattggattactcaagaaacaagaacaatttacaactctaaagctaactcgtgagaacattgcctgattatattcagataatgtttaaattttgcttcctttctcatgggtctgcgttttcctcttattactgtttttcaactggtctgtgcctaaaatcttatctctatattgtatggtcctcagatcttctagtgcttacttcttatcttctatacatcttatttaggcttcctacttcctgtcccttctatcaaccatcctctctgtctttcttttatgcttatcacatcttgtattttggaaacttctacccacttacctcctctctcccccaactgccaatatatataaacttcatctgtgaccttattacttctcagataatctattttttaaataatgacagcaataataatattaactaatgaactaatctatgcccaggttctggtatattatattttttatatataatatatataatactaacatatataatatattatatacaattgaggccaaccttacaatcaccccagttattggcctagaggacttttctacaccacagcacagggagatggacccatatatagcatgataatctctctggttgtggggacatagattggaattttggttggctaaggcagatgtgctaaatgtagttatgcatgaataaggtgaaattttatgaggtaaagaagaattggtcatctttaggttgagcattttcctgagttcacatagggccaagagatttcaagttctgagtatccagcgtaaaaagatctcgttgtatgcagggaatacagtaaagaccctggaaacatggcactgtggtagaagggctaaactagcactagcacggaggctactcaagccccaccataccaatgcataaaagcaagtctcaaaagacttacactggttcataaataactaccagccaaatacaatactttcattggaaaaatatataatataatatataaaattatctcgctattttgccctggctggacttgagccactgagctcaagtgatcctcccacttcagcctccagagtaactagaactacagacagggaccgctgtgccaggcccctcatttttgaatgagaaaagattcaggaagggtaactttgaattaaaagtattgatattatttctatatatgtgtgattaataaaagtgaaggctaaggaaagagtttcagcgaatattcatttacattttctccagatttgtgatatcctctcccttcaacacacatgtattacctcatacagatatttcatagttgctataatgcattcataatggtcagttctgctcttagtgaaaatagatgcatttttagtgttggggtaatttatagaataccctcagcctgtcctctctctctcttctctctctcttctttacatctaactgtggagatctgtttttaatcaatctacgtctgcagaacaagtttggtctttgtaaaattaattaattaatttgtgtttatcttcagagactttacattttggtaggagttttactcatcagaagaataatttttcaagcagtttgactttaggttcccaatttaaaatttaggtttttaaacataattagtaaatcactggctgctctctttttctttcttccctaaaaaaggttcaattatgagttccttttatataatcactattcattcaaacaatattacaataattctttactattttattagtaaaatatgacacatttgtctggttatgtagttaattactaaaatgacagctattacattttgattctgttgtcctatgctgccatggattccaaccacagtctgtccagtaaaaaatctaaaaaccttccagcatgatgccttcttcctcttttgaggctcttctcttagtcctgcttgcacttgctgactgttgttcttttcaagaaacctggacagaggagaagtaaactgttgaaaagttaggcacacaggcttgagaattaaacatgtttaagtttaagccctagctctaccccttgttagtagtatgactctgagaaagtttcttaaatggtctaagctgtggtttcctcatcttcaaaataagaatcatgacatcagtcgggtttgtaatctaatgaactaatatctataaagcacaagtactgtacttggcactttgagtcaattgataagcttcagaaggtctgtgaacatcatgacactctaatgttttcagttgcaattttctttttcttttagacagaatctgacagagtaagactctgtcacccaagttgaagcgcagtggcgatctcagctcactgcagcctccacctccaggattcaattgatcctcctgcctcagcctcccaagtagctgggattacaagcatgtgccaccatgcccagctaatttttgtactttcagtagagacggagtttcaccatggtagccaggctggtcccaaactcgtgacctcaagtgatccacctgccttggcctcccaaagtgttaagattacaggcgtgagcactgtgcccagctgcaatttcatttttatagccttgaaaatggtctttgtgaaaaaaagacagtggaaaaattgttattaaggtattgcatcacttcaaaaatatgtagactgcttctcctttaattatcaaatataattggtaatcagctctaatatgagttctagcaaatattcccaataatagtaattataagaaatgcaccctagcattttgcatagggacatctctgactatatttggcctagtttagattgaaggatgccaaggaaaataaggtacaaagaaacttgcctattctttgggtttctgaccagcagtgaatgtgataaacataaaaattcctaaatcttttgaacaagtttcttttttaatgagtgcattgattcctaaagatcctttatgtccactttgaaatatgttggaaagaatagattttatttatgaaaaaacttttgatttgaatggagattttccaaaacttaaaaactatgtaccagttgacataaagactaacattaataataataatattaaaacaatgacagtaaaattaaaaaataaaagagagaaaaacaaagcaataataaatattagacaaatgaaaataaaggcatcaaagaaatatagcaggcataaaagacagtatttttgtctacccaatatcctttctgtcttttttttttttttaaccaacgaacctcaaattttgcttgggatgccacattgcctgctagaaaaaaaatccatatttctaacttttcttgcatagagggggccatataagatctccatctgttgggacataatcagaaatctgctgtggatgctggtaaattttttttctttatactggtgctgccttttcctcctagttgcttctttattcctcctagttgcttctttattcttctttctgacagaatcaactttattttattttattttatgattattatactttaagttttagggtacatgtgcacaatgtgcaggtttgttacatatgtatacatgtgccatgttggtgtgctgcacccattaactcgtcatttagcattaggtatatctcctaatgctatccctccccctccctgcaccccacaacagaccccagtgtgtgatgttccccttcctgtgtccatgtgttttccttgttcaattcccacctatgagtgagaacatgcggttttttgtgagaacattttggttttttgtccttgtgatagtttgctgagaatggtggtttccagtttcatccatgtccctacaaaggacatgaactcatcattttttatggctgcatagtattccatggtatatgtgccacattttcttcatccagtctatcgttgttggacattagggttggttccaagtctttgctattgtgaatagtgccacaataaacatacgtgtgcatgtgtctttatagcagcatgatttataatcctttgggtatatacccgtaaggggatggctgggtcaaagggtatttctagttctagatccctgaggaatcgccacactgacttccacaatggttgaactagttttcagtcccaccaacagtgtaaaagtgttcctatttctccacatcctctccagcacctgttgtttcctgactttttaatgatcgccattctaactggtgtgagatggtatctcattatggttttgatttgcatttctctgatggccagtgatgatgagcattttttcatgtgttttttggctgcataaatatcttcttttgagaagtgtctgttcatatcctttgcccactttttgatggggttgtttgtttttttcttgtaaatttgtttgagttcattgtagattctggatattagccctttgtcagatgagtaggttgtgaaaattttcttccattctgtaggttacctgttcactctgatggtagtttcttttgctgtgcagaaggtctttagtttaattagatcccatttgtcaattttggcttttgttgccattgcttttggtgttttagacatgaagtccttgcccatgcctatgtcctgaatggtattgcctaggttttcttctagggtttttatgattttagatctaacatgtaagtctataatccatcttgaattaatttttgtataaggtgtaaggaagggatccagtttcagctttctacatatggctagccaattttcccagcaccatttattaaatagggaatcctttccccatttcttgtttttgtcaggtttgtcaaagatcagatggttgtagatacgtggcattatttctgagggctctgttctgttccattgatctatatctctgttttggtaccagtaccatgctgttttggttactgtagccttgtagtatagtttgaagtcaggtagcatgatgcctccggctttgttcttttggcttaggattgacttggcaatgcaggctcttttttggttccatatgaactttaaagtagttttttccaattctgtgaagaaagtcattggtagcttgatggggatggcattgaatctataaattaccttgggcaatatggccattttcacaatattgattcttcctacccatgagcatggaatcttcttccatttgtttgtatcctcttttatttcattgagcagtgtggtttgtagttctccttgaagaggtccttcacatcccttgtaagttggattcctaggtattttattctctttgaagcaattgtgaatgggagttcactcgtgatttggctctctgtttgtctgttattggtgtataagaatgcttctgatttttgtacattgattttgtatcctgagactttgctgaagttgcttatcagcttaaggagattttgggctgagacaatggggttttctagatatacaatcaattcatctgcaaacaggtacaatttgacttcctattttcctaactgaataccctttatttccttctcctgcctaattgccctggccagaacttccaacactatgttgaataggaggggtgagagagggcatccctgtcttgtgccagttttcaaagggaatgcttccagtttttgcccattcagtatgatattggctgtgggtttgtcatagatagctcttattattttgagatacgtcccatcaatacctaatttattgatagtttttagcatgaagcattgttgcattttgtcaaaggccttttctgcatctattgagataatcatgtggtttttgtctttggttctgtttatatgctggattatgtttattgatttgcatatgtggaaccagccttgcatcccagggatgaagcctacttgatcatggtggataagctttttgatgtgctgctgaattcggtttgccagtattttattgagattgttgcatcaatgttcatcaaggatattggtctaaaattctcttttttggctgtgtctctgccaggctttggtatgaggatgatgctggcctcataaaatgagttagggaggattccctctttttctattgattggaatagtttcagaaggaatggtaccagctcctccttgtacctctggtagaattcggctgtgaatccatctggtcctggactttttttggttcgtaagctattgattattgccacaatttcagatcctgttattggtctattcagagattcaacttcttcctggtttagtcttgggagggtgtatgtgttaaggaatttatccatttcttctagattttctagtttatttgggtagaggtgttgtagtattctctgatggtagtttgtatttctatgggatcggtggtgatatcccctttatcattttttattgcgtctatttgattcttctctcttttattctttattagtcttgctagcgatctattgattttgttgatcttttcaaaaaaccagttccaggattcattaattttttgaagggttttttgtgtctctatttccttcagttctgctctgattttacttatttcttgccttctgctagcttttgaatgtgtttgctcttgcttttctagttcttttaattgtgatgttagggtgtcaattctggatcttttctgctttctcttgtgggcatttagtgctataaatttccctctacacactgctttgaatgtgtcccagagattctggtatgttgtgtctttgttctcgttggtttcaaagaacatctttatttctgccttcatttcattaggtacccagtagtcatacaggagcaggttgttcagtttccatgtagttgagtggttttgagtgagtttcttagtcctgagttctagtttgattgcactgtggtctgagagacagtttgttataatttctgttcttttacatttgctgaggagtgctttacttccaactatgtggtcaattttggaataggtgtggtgtggtgctgaaaaaaatgtatattctgttgatttggggtggagagctctgtagatgtcaattaggtctgcttggtgcagagctgagttcaattcctgggtagtccttgtttacttttgtctcactgatctatctaatgttgacagtgggatgttaaagtctcccattattattgtgtgggagtctaagtctctttgtaggtcactcaggacttgctttatgaatctgggtgctcctgtattgggtgcatatatatttaggatagttagctcttcttgttgaattgatccctttaccattatgtaatggccttctttgtctcttttgatctttgttggtttaaagtctgttttatcagagactaggattgcaacccctgccttttttttgttttccatttgcttggtagatcttcctccatccttttattttgagcctatgtgtgtctctgcacgtgagatgggtttcctgaatacagcacactgatgggtcttgactctttatccaatttgccagtctgtgtcttttaattggagcatttagcccatttacatttaaagttaatactgttatttgtgaatttggtcctgtcattatgatgttagctggttattttgctcattagttgatgcagtttcttcctagctttgatggtctttacattttggcatgtttttgcagtgggtggtaccggttgttcctttccatgtttagtgcttccttcaggagctcttttagggcaggcctggtggtgacaaaatctctcagcatttgcttgtctgtaaagtattttatttctccttcacttatgaagcttagtttggctggatatgaaattctgggttgaaaattctgttctttaagaatgttgaatattggcccccactctcttctgtcttgtagagtttctgccgagagatccgctgttaatctgatgggcttccctttgtgggtaacctgacctttctctctggctgcccttaacattttttccttcatttcaactttggtgaatctgacaattatgtgtcttggagttgctcttctcgaggagtatctttgtggcgttctctgtatttcctgaatctgaatgttggcctgccttgctagattggggacgttctcctggataatatcctgcagagtgttttccaacttggttccattctccccgtcattttcaggtacaccaatcagacgtagatttggtcttttcacatagtcccatatttctcggaggctttgttcgtttctttttattcttttttctctaaacttcccttcttgcttcatttcattcatttcgtcttctatcactgagaccctttcttccagttgatcgcatcggctcctgaggcttctgcattcttcacttaattctcgagccttggctttcagctccatcagctcctttaaggacttctctgcgttggttattctagttatccatttgtctaattttttttcaaagtttttaacttctttgccattggtttgaatttcctcctgtagctcagagtagtttgattgtctgaagccttcttctctcaactcgtcaaagtcattgtctgtccagctttgttctgttgctggtgaggagctgcgttcctttggaggaggagaggcactctgctttttagagtttccagtttttctgctctgttttttccccatctttgtggttttatctacttttggtctttgatgatggtgacacacagaagggtttttggtgtggatgtcctttctgtttgttagttttccttctaacagacaggaccctcagctgcaggtctgttggagtttgctagaggtccactccagactctgtttgcctgggtatcagcagcggtggctgcagaacagcggtggctatagaactgcggtgactatagaacagtggatcttggtgaaccacaaatgctgctgcctgatcattcctctggaagttttgtctcagaggagtacccggccgtgtgaggtgtcagtctgcccctactggggggtgcctcccagttaggctgctcgggggtcaaggacccacttgaggaggcagtctgccttttctcagatctccagctacgtgcttggagaaccactactctcttcaaaactgtcagacagggacatttaagtctgcagaggttactgctgtctttttgtttgtctgtgccctgcccccagaggtggagcctgcagagacaggcaggcctccttgagctgtggtgggctccacccaattcgagcttcctggctgctttgtttacctaatcaagcctgggcaatggcaggcgcccctcccccagcctcgctgctgccttgcagtttgatctcagactgctgtgctagcaatcagcgagactccatgggcatacgaccctctgagccaggtgtgggatataatctcctggtgtgccattttttaagcccgttggaaaagcgcagtattagggtgggagtgacctgattttccaggtgccgtctgtcacccctttctttgactaggaaagggaactccctcaccccttgcgcgtcccgagtgaggcaatgcctcgccctgctttggctcatgcatggtgtgctgcacccactgtctggagctccctagtgagatgaacccagtacctcagatggaaatgcagaaatcacccatcttctgcatcgctcacgctgggaactgtagacaggagctgttcctattcggccatcttggccccaccccctcctttttttttttttttttgtttgtttttagacagagtttcactcttgttgcctggagtgcactcttgtagactggagtgcaatggcatgatctcagctcactgcaacctccacctcccaggttcaagtgattctcctgcttcagcctcccaagtagctgggattataggtgcctgcaaccatgcccagctaattttcgtatttttagtagaggcagtgtttcatcatgttggccagactggtcttgagctcctgacctcacataatctacccacctcagtctcccaaagtgctgggattacaggcatgagccactgcacctggctagaataactttttagaagtaagagattggggtgaccatggatatgacagctgctgctaaggataccagagcagaaagagagaaagtgctgtcgatctgctgtatacgaactgaaagtaatactttcaactcattatgtgggataaactagtgaactttcaactcattatgtgggataaaataaactcatatatggttaatccactctagttgaatatctgttacaggcctctgaaaatgatcccaaactgatatgaaatatcattttatattgataatatatatatatttcacacaacatctcattttctttttgtttctgttaaaataaccacagcaataatattcattgagaactaactctatgacaaaactctattaaatgttttataaataccataatcaaatcaatactgaaaacagtataatacactgatacctattaaaaaacacaaaagcaaacgctttaaaatacaaagaaaatttaaaagtatataatcataaggtaaattttaacagagcagtaatcatcaataatagattaaacattgaaatttaaactagatattaaagcattcaaactaataaacttacacaaacttttgtatgatatatacatttgtctcactttcttataaaatgtctaaagaaagtgaaaagtcatatacttaaccctaaataaaatattaatagatttttaaaaattaaaaaaaaattctagctaaattgtctgagcataacctgtaaaataaaccccacaatcatttgaaaatatgcaaattatctcccaaatagccagtgtctgaagtacccacctcccccttgcctgcacatgatgctaccctggggttccaacctggaggggtgttttgagatttgggcgtggatattagaatggagaatgatggaatatgtagtgtgcatgctagaacttgggtggagatttcccatataaaaaattatctgaatggactaccagcttcagaaaagccaagtagaagaaaaattatcaacagagtgaacagacaacctaaagaatgggagaaaatatttgcaaactatgtatctgtcaatggtctaatatccagaatctgtaaagaacttaaagaaatcaataaccaaaaaacaaccccatcaaaaaataggcgagggacatgaacagacacttcttaaaagaagacatacatgtggcaaacaagcatttgaaaaatattcaatatcactaataattagggaaatgcaaatcaaaaccacaatgagataccatcttgcactggtcagaatggctattactaaaacatcaaaaaataacagatgctagcaaggttgcagagaaaacagaatacttatatactgctcgtgggaatgtaaatttgtccagccactgttgaaaacagtctggcgatttctcaaggaacttaaaatagaattaacatttaacccaagaatctcattactgggtatatacccaaaggaatacaaattattccaccaaaaagacacatgcacatatgttcatcacagtactattcacaatagcaaagatacggaatcaacctagatgcccatcagtcgtggactggatgaaaaaaaatgtagtatatatacatcatggaataccatgtagccataaagaagaatgagatcatgtcttttgcaacaacatggatggagctggaggccattatcttacatgtattaatgcagcaacagacaaccaaatactgcatgttctcacttacaagtgggagctaaacactgagtacacatggacacaaaggttcaaggggtacatgtataggtttgttatgtgggtaaattgcgtgatgcaggggcttggtgtacagattattttgtcaccaaggtaatcagcataatacccgataggtagttttccagtcttcatcattctcccacccttcacccacaaatagggcctggtgtctgttgttcccttctttgtggagggtggcaggagggtgtggattgaaaaactacctatcaggtattatgctgattacctgggtgacaaaataatctgtacaccaaacccctgcaacatgcaatttacccatgtaacaaacctgcacctgtatcccttgaacctaaaataaaagttggaaagaaaataaatgaataaataaaggctttccatcatgtgaaaaaaaaaagtcaagcagagaggtgaatatatggtagaaagcaatatggctggtatttaggacagtggagtggttaatgtggttaagtgtgtagggaagaggtagaacctagagagatctccctgggtgcccaggtatagcgttaaggggtttctagtatgagaaaagtcccaggagcaggggttttctcttaaaggctcatttccctttaagcatcctgattaacagtgtaaatagagggtgtcttagtgccaactagaaataagctgaggcaaatcaggtcttcagctgttttaagctgcacagttcttccttttcttgagaagagaagtttttttgggtggtcaagatagaaaagttgtggaacaaactgccaataacatctaatgaaccctagggtcttgctcttcagagcatgcatagcatgagggactcttggttggacccaatacatcctaaaacctatacctggagccgtgctcatcaccagattactcactacccttctattctcaaaatgactatagcattccaaaacacatgggatgaggtgggggcaggttggggggtggaggtgcggtttggagccacagcttagtttgcaacaacttttctgcctcaaagcaaaataatattctaataatcactaaatgaaacattatggagctatttaactgtttaccatgattttaaaattacatgtagacttttcgtgttgtaatgtctaactatatatacaaactatgtggacatcatgcttaaactgtatataaaagccatagaaaaaggtaaataaggggaaatattttcaaacattatttctggtatattcagatgaagaacctgtggttcattttatttatttattttttactttactgtttttcaaatattcttgagtagacaaatattattttttaaaaaacttatgaaattaatgaattgaatgctaaatatgcaaaatcagagataggtactatggggacaaaaggatacataagagtaagagaaaggatgttttccttaaagacctttatcacagtagaagagatgagactttcacacataacgtaatatatagtagaaagtagcaaatgctatagcacagagatacaggggaagaagagattatgaccactaccattagtcatttgtaatttacttttgacccatacaggtcagctttagactagtgaataacaaagtcaagtttatataatggatctgtgtgtacctgtaggctattttatttaccatttatattttggagaacgggaacctcattgctagtatttcataggatctctttcctctcagatttggaaaggtgttctgaaagaagaaacaaggtgtcacgcccagtgttaggttccagcccatgctgaggtctgaagggagtgggtggatgggtgggagatagctgaaagaatacttggggtggtgggggtggaggcgtaggcagataaagtatggttttattcagcagctttctttttcttctattttcttttcgagacggagtttcactcttgttgcccaggctggagtgcaatggcacgatctcagctcactgcaacctccgcctcctggattcaagcgattctcctgcctcagcctccctggtagctggaattacaggcgcccgccaccaagcccagctaatttttttgtatttttagtagagacgggatttcaccgtgttggccaggctggtctcgaactcctgacctcaggtgatccacccacctcagcctctcaaagtgctgggattacaggcgtgagccaccgcgcccggcctattcagcagctttcttatactgtctgtcttggctgcctggtccggctctgcagctccagccactcccacgcacagctgcatggccggctctccctacagggtcactggacacgaaccatatgcacagcatcagcaggacagttataccttttacaaacaatagtggctccgagccaggtgatgagccttcccatattatggctacacagctgtgattatataacaagtggagttatgcgtctgtgctccaaactcaccgaagtcactttggcctggatgtctcctttggcctatccttgactaaagcacatccatataccttacactccaaacgctaggcctagggagacataggccttggatacacaggttatacacataaactttgggtacataggctccatctacacacaccggctttatacataagttttgggcatacagatttgattcaccggtttggcacacaggccttacacaagggtaatttaattttaacagacctgttttgacatgacttgaattgatttgaaatacacctgagaattatagtagcttaaagatgacccttgactcattttctggtcaaaaaatacattccagagaattttaaatatgaaaataacctttgtgagacttctacagtgaggattttaaaagcttctataatttaagcaagtgtatagactatcagcagctgaacccctaatttcccgagcctttctaaagcattaaaaaaaataaatctcttagcaaatattaaatctgatcctactgttttcaaagtggtcatctgacaccgaaatggaaagcatacgtagagaatgatagggagaaaggacatcaaatatttattctagctgtcatttcatttcaatttagaatacagtgttgtgaaagttatacagatcacatgtagatattattcaaagtgcttcaataataggaatacaaaatagagttaagcatttgattttattattcagtttccattctttaggttataaagagacaaatacagcaagcacacaatgactaaatgggcagaaaaatggagttaagtatctaaaatttaaattacattgttcagaatatattgagtacaattaataatagcattttgggaattacaaaagaagagaacacaagcatattttgattgtgtttttattccattcacatggaaattttaattttatttaaagaaaaagaagaaatactttgataactatgtatacctgtataaaataaatagttataatccaatgtttaaaggaatgtttggcataacaaagacatcatgttctagcacacatccatttcaaaagcactgtggggttctgataacacacaacagtaacttccttactttccttgactacaacccatggaaagaaataaactgtcaaatcatagccaaaaagataatctagtttactttccccctttgaggctgaatcatgtgtcagccctgggtactactgtgaagttcttctgttcttaaaactactattattcagttcatctgtaaaatgagtctaatacagttaggaggactaagtcaaagaatgtgaataaaacactcagtatgggtatcatacatatgaggcaataaaaaaagcatctactactattattattaagaagataatatggtaacctgcttgagcaacctcttttaaactgtaaaaacatttttttccaagaaatttttcctcttatatttcttttagacaattgaatttcccatgctacaatttatactgtatatctagcattggcaatgtcctctaattatttgtttcacgtttttctccacattcctctgccattctttaaccttgtgagttccttgaagttaggatcccagtcttattccaattttatgcccagtgcatagcttgaagctgggtattcagtcaattcttaacatacatcagttcagtgagtgtgagaagaaaaataacatttttgactaatatattctcttgctcttttaaaattaaatttacttttgaaaaagtaatatttgcacatagtttataagccaaatagaacagaatgatatgtaacaaaatacagtaatttcctctcacttttccagttctcttcgctagaggcaatcacttttgatttctttagaggtttcttccttttatgttaccatatttctaaatagtatatatatataaaatatatatgtatatatacacatatatgtatatgtatataaaaatatataattttatatatacacacacacacacacacatatatatatatacacattttttgagacagagtcttgctctgtcacccaggctggaatgcagtggcaccatctcagctcactgcaacctctgcctcctgggttcaagtcattctcctgcctcagcctcccgagaagctgggattacaggtgtgtgctgccatgcccggctaatttctgtatttttagtagagatggggtttcaccatgttgcccagactggtctctaactcctgacctcaggtgatccacctgcctcagtctcccagagtgctaggattacagacgtgagccactgcacctggactctattgactttctaataaaaagtctagctaatatgaaatatgtctaatatgaaagtctagtctaatatgaaagaactagctccctgaaacttctatcacttctgcttcccttccctatttcctacaatagagttatatcagaagattttgtttacatctatatttattgcttaaattattatgaatatgtgagtaatatttataactgagcattttagaaatttattaaaattacattttcttttgtatttttaatgttttaacatcaatgatagccttgctttttcataaatgaaaaagaattcatttaaaacttttgctaatttttcatattttccaacagtcttttgataccattttcaccaatatcattcttatcaggtaatctactaattattttatggagtcatacatctggagctctccatcccttttctatttgaatgaactgctctttagaaatgcttcaaagcacctgtccaggaacttccctttgttgccatgcaaaaaatttcattgattttctcctgatttgggtgtcctattttcttcatcctgtcttttcttctttctagtttatttccttgttttgttggagtatatcctttatttcttgagaaagagtgcatgagaaatacaatatttgagagtatgcatacttgaaaatgtctttattttaccgtatcactgctagtgtgggcattgatttcgatgatggaaaaattttttagtcacagtcgtgaaggtgtttcttcatccttttctagagagcagtggtgttgagatgcctgaaattaatttgattcctcatctttgcatggcattctatcttttatctctttttgaggttatctctgttatcctaaaatttcacttatatgcttgagtgtggatctatttttcatctctcttgttagcacttagtatgcccttttaatctggaaatcatgactttcagtgctgggaaattttctttaattattttcttgatgattccctggttactctttaatttctctttctgaaagatctataattcaaatattgcaccttcgggaccatcttattttctcatattttctctcatttcctttctctttgtctttgcactttaattactagatgatttctttgacattatctttcatcagtactattgagtttttcctctctgccattatgcttttaatcatgttctttttttgttttctaaacatctctttttatctagcatcttgttttggtttcatagatgcagtattttctcttatttctctgagaacatttgaactttcttctcccactaaggtctttgtttctattattgtttttctctctattgttcatgttagagctttcctttgatttccccttatccttgtcatttcctcattttaagtgtggggaacaaaaaagtcatcaacattgagccagcattctggaagccacgaggaaagaatggaggggtctcagcattcagtattcaatatgtttatgttcacttttccacccagttttcacactgtgcttggcatttcccagtccaaagacctcctgttttgtctttaaatactaaaactccagtatttctactgggttaaatgagagtaatcacccagctatagaaagtgacggaaggaatctttgacttagtacatctttttttttttttttttttttttttacaacaaattatcagtatgtttattaaagcaacttcctccagtcctccgtttttagtcttgggccattctagagatggtgccagttcctgagccttctgtgcattctcgatgtcatgttggttctctgctctctccactgctacttctcagttctaaatttaccctttttacttgctctgtgtaaatggagatgggccaattaaatatttctctttgcagctgccatgatgttaagctttgttactaggtggtgttggagatacaccgcagaaggaagaggctttctttcttggttccaatgtgttcctttcgtcaggctcctacagtatgagtagcttctgcagcatgagtctctttctagtgcaggtaacttctctggggcctggctttacagttcacgccaggtagcataacccagcggccagcagcttcctcagcatctccacatctcaggcagttttgttgttgttttgttttgttttgttttgagacagtgtcttgctctgtcacccatcacccaggctagagtgcagtggctcgatcttggctcactacaacctccaccccctgggttccagtgattctcctgcctcagcctccctagtagctgggattacaggtgtgtgccaccatgcccagctacttttttgtatttttagtagagatggggttttgctatgtttgccaggctcgtctcaaactccaggcctcaagtgatctgcccgccttggcctcccaaagtgctgggattacaggcacgagccaccacacccaacccatctcaggcagttctaaaacagagtgcctccagtctgctatctccctagaaatagttttctctgcaccctagatggtgtttttatttccagcaagtccaccagtgcagcatcaaggcatcctctttgcatccagggagccatttctattcctcttccaacaaggtctggatctcagtctttagggctagtggtggggttgggtggagagtggacagaaataggttcatctttgggctctagctcattgtaaagagtagtggctactccttatatctgctattcctaaattcactggatttttttttatttcttactaactaatcttcgtttatccctatctcctgttatagttagtaattctttattataaactctccctgttcaaattactgcattcaatttgttcttagcagatacagttacttaaagcctacccaaagctctctgtcacccgcaaggtaatagcatggtctactctgctcttcttaatctgcccctgaccatctctccatttatcccctggctaccctgaccacctgtattctgctcctaacctctaaatactcattttcttttcaagagtgtaaactattaggttggtacaaaagtaattgcagtttttgccattaaaagtaatgaccaaaaccgcaaattacttttgcaccaaccgaatactcagttttcagggtccacaaagccgattgatatcctggcccttaaatgcatgcagtttcctcactctagaaatacctgaactcatcaccttgttgcactcatctctcaagattgctcaaatatcttcttttttttttttttttttttttctgaaaaaggcttccctgactcttcgctctcatgaaatgagttgcttttagttctttctcctcttaggacacaagccatccataggtctgtctccctgagtttacagtgaaccatttatccttctttatattaccagatctttcatgctgaccttttgttatatattaagaactcagtaaaattgtgaaataagtgaacgtgtttaatttttaaggaatctaatttacagtttcctccatagagaattgaacaatgaataagcaagagaaaggtgagatttcaggaaagggaaaaagattaaacagtaggatgactcttccttaatgtgcagctatattttcactcctgtcaccacaaatacgactgcaccaccctgctatttcaaagcagctgtcaggccagctggagcttggagctcttaataaatcatgtgaatggagcaaagtgacacagatgcttctagtttagggaaaaattaatcatcagtatattccagtattctggtggacatttgcatttataggtcaacaggtacagctgagaatttatagttcgcaaaagcaatcagaaatcagcatttcttagattccttaaatttgtcaattaaaaattttgtactacagagctggcatttccctgagctggaattttgcttatacacaaggactactagactacattactgtgacttcaaactatttgttactttctgatgaagataacacattagcctacaataatgacagaaaaagtaattaattccacctataaagcaaagattcttgaattttccaggcattgtctcaatgatctgctttgaaatgtagatatttaaatatgtgttaattagctttctatttggtttagacattatgcagttcaatagaaatataatgttaaataaatcctagggcacagagattgtccatgcaatgcctctctaaatgttctgatacgtttataaggcacatgatactcataatgcttgcatttgaatagtgcttgtactcacttcaaaaactcacatttataaagttataagatggccaggaattattatcttcattttacagtggaaagataactgagcagtagtggggctgtctatcaaaggtcatacagccagtatgttggaaaacaaggactttaatcaagggctctattattcaggggtaagtatataacctgaacagagtaaactttaaagagatccacattttaataaacaggtcaattcttttcttatatagagattcatgcaaggctggggcaccaaaaaatcaatgaattgaacatgaaatactagacttttctaagtgacctctaaaaaatcaattcaaaagaacactctattagtaactttagataattgcctgcacagctatttggggaaaaataagtttcctcttaaagattttcaataaaaccaacagcaaattaaggggggacagatagggagataccgtgaaggagatgggcaaagcagaaggtaatacattcatcaatttatttctagatcacatgtttatgatgcttcttttctttgttccagtcactgagataaacacatataaatagagaaataacaacctctgtgaaaagcgctctattagttatgaactatgtgctgggggtaacctagagatgggactgatccactggtttgggggaataagaaaatcagaaaataaaggatatttgagttgagtctcgaggattaattgagtaatccacgagaagcagaggagcaaagtcattttcagcagaaggaccaagatgtacaaagactggaaattaagaaaacacacaatgtattctaggaaacgtgaggaatccatcctgacttgagaataagctgcaggtgttagagccaaggccataaaaacagttggaagtaatatttgaaggaggtttttggctatgagttgtttgcattttatcttgtagacagcagagagacattggaatttcatatattgtggcaaggacaattgagaaaactcaacatttaaattgactttagacaagacacaaagtgctaaaatcaaggaaaaaaatagaagataaaagccacacagagttggcctgaatgcagcattttctctttgatgtggaggggataatctcatatcctaattttgtagtttcctatcctgcaggccttctttttcttttcaaattgccattaggactttagcctttggttctatttcttatcttagtgttctgctttctttcaaaacattacttgatggctggtttgaagatcctgttcactgtcatttagctcttgtttataagtgttgatacttgtgaaaaggctaatctcattataacatgtaagagaaaaacaccaacttggaattgaaaagatgtgtataatacagaaatatcacacaaaagttcaggggcttgtcaccttggtgaaacttattgtggtctagtggtttggggcatttagatctatgcttttaaagaagaaggatgatatggtctggttctgtgtgcccacccaaatctcatcttgaattgtaatctgaattttaatccccacgtgttggggaaggcaccttgtgggaggtgattagatgatggggcagttcctccatgctcttctcatgatagtgagtgagttctcatgagatctgatggctttataaagggcttttcctgcctttgctcagcacttcttcctgctgctatgtgaagaaggacgtgttttcttccccttccaccataattgtaagttttctgaggcctccaaagccatgctgaactgtgagtcaattaaacctctttcctttatgaattagccagtctttggtatgtctttattagcagcatgagaacgactaatacacaggacaagttactgcatctggccccttctaacacaaaaaggcggcacaacaacttgtcaacttccttgaatttttagaaacaacaaacttcttacttggacatgctattctgatctatgtacctagtgtctctaaagactgccaattttgagtaggaccagaacaaaagaaggctctgtataaggtccatgctcccatacaagctgctctacaacttgggccatatgaatgagcagatctgcgggtgcctgaagtgtcaaaggtagacagagatgctgtatggaacctctggcaggtccctacaagtgaatcctagcacagagctttaataattttgaagcaaaactttgtctcctctgcagaaaactctcctccttttgaaaaccagcttcaggcttgctactggacaagccacaagtaactgaaagcttgacaattatctactaagttaccaagccacatgtgctacctatcacaaactaagtgttttgcaccaagccaaaacactggatatgtataataacacttgattgtcaaatgaaagtaatatatacaagaccaggctcagccgggcgtggtggcttacgcctgtaatcccagcactttgggaggctgaagtgggtggattacttgaggtcagaggtctgagaccagcctggccaacatggtaaaatcctgtctctactaaaaatacaaaagaaatagccaggtgtggtggcgggcacctgtagtctcagctactcagaaggctgaggcacgagaatcacttgaatccaggaggcagagcttgcagtgagctgagatggctgcactacagcctgggcaaaagagaaaaacttcatttaagaaaaacaaaaaaacaggctcaagcagatcttcaaggtaacaaattagtgcatgagcaaatgtcacagatgttcatggcccatatttctgcctcattgcttctttcaactcaaccgatacctgtgttctcatggggagctccctataatcaaccaaggaagaacaaaatttggggtctgctttatatgaccaggagaggattgttttggattgttctgtgtcaacttggttaagctgagaaccgtatttcccagaatctttttccctgtaagattgtaagttaaagctgaccaaaagagaacttgtgtaagatttggaaggcacacatgtgaaacagcagcctttactttctggaagtctttgtggctagacaaagtgacaaaaccaaggagctcttcttcccaactcttggccctggcaattaggagcagtccaggttcaacaacagatgcttgtctgtaaatcgacagaagccatagataacttcccatagacctctcattagcttacctctaacagaatcacttgatgggtagatgtgctgtcctcagatttacctgcaatcattgacttttttacttgcacctttgcttagggaggatcctactccttatttgatcttcctactctccctttggatttgcagttacctagctcctccctcaattgggtaaggtctgatttttacaatgtatcccttaccccgttgcacttatagtaaccctacttccatgactggactatcacataccctccaagctcccgattttttttggaaatcatcatgttaacacaagaggtgaacaactaagtgaattttaagaaattaggaagtcctatttgttaggactccatgtttcaaaaacacatactaaacttactgaagcagaaaggtgaatttattggctcaaattgctgagaagtgcaggttgtatttgtagggtttagtcatggctgaatttagatacacacacaatgttatcaagcctcttttttcatgcttctcagctctgatttcttggctggtttcattctcagaagctctgtaagtggtaacaaagacaaatattgacagttccaggcttatattctaccagcttagtaatgccagtggattaagaatattctttcctcaataggtttagcaagttttcaagctgatttggttcatgtaccttgagtcatatgttcacctcttaagcagcaattgtggattctactagtgaaaggtacagtcagactagtccccaagaactatggcagcccatccaaacctcacatgttggaaatagagaagtctataagaaaaaatgggcttccattgtcaagatgtttgataagtaaaatctacatatctccattatatcatccttagttgtccagtaaatacataaactttcttttaattcatgtatcttcaacatttcttttagtacatacattgcttctatgtaatataataaaactccttcatacacaagaaaaagccacagtcacctcctctctatttttttaaattttattttttaatcaattgattaatatatattttttccataagttattgggtacaggtggtatttggttacatgagtaagttctttagcggtgatttgtgagattttggtgcacccatcaccggagcagtatacattgcaccatatttgtagtcttttatcccttgcttccctcccactttttcccacaagtccccaaagtccattgtatcattcttacgcctttgcgccctcacagcttagctcccacatatcagtgagaacatatgatgtttatttttccattcctgagttacttcacttagaataatagtctccaaactcatccaggtcactgcaaatgctgttaattcattcctttttatggctgcatagtattccatcatatatatatgacaaaggactgatatccagaatcaacaacgaactcaaacaaatcagtaagaaaaaaacaaacagtccccaaaaagtgggctaaggacatgaatagacaattctcaaaagaagatatacaaatggccaacaaatatatacataaaatagatacataattatatatataatatatatatatgccactttccccactttatgtttttgtctgctttgtcaaagaacagttggctgtatttggtttatttctggcttctgtattctgttccattggtctgtgtgcctatttctatcccagtatcatgctgttttggtgactatggccttatagtatagtttgaaatcaggtagtgtgatgccttcagatttggtctttttgcttagtcttgctttggttgtgtgggctcttttttgttccctatgaattttagaattgttttttttctaattctgtgaagaatgatggtggtattttgatggggattgcattgaatttgtagattgcttttggtactatggtcattttcacaatattgattctacccatccatgagcatgagatgtgtttccatttgtttgtgtcatctatgatttctttcaacagagttttgtagttttccttgtagaggtctttgactccttggttaggtatattcctaagaattttattttttggcagctattgtaaaaggggttgagttcttgatttgattctccatttggttgctgttcatgtacagaagagctactaatttgtgtacattaatcttgtatccggaaactttgctgaattcttttatcagttctaggagctttctggaggaatccttagggttttcaaggtaaacaatcatatcatcagcaaacagtgacagtttgactttctcattactgaatcagatgccctttatttctttctcttgtttgattgctctggctaggacttccagtactatgttgaagaggagtggcgagactgggcatccttgtcttgttccagttctcagagagaatgctttcaatttttccccattcagtattatgttggctgtgggtttgtcgtagatggcttttattacactaaggtatgtcccttgtatgctgattttgctgagaatttcagtcacaagagatgttggattttgttgaatgcttttttttttgcatctattgagatgatcatgtgatttttgtttttaattctgtttatgtggtatatcacacttattgacttgcatatgctaaaccatccctgcatccctggcatgaaacccacttgatcatggtggattatctttttgatatgttgttggttagctaatattttgttaaggattttagcatcagtgttcatcaaagatatcagtctgtagttttcttttttggttatgtcctttcctgattttggtattagggtgatgctggcttcatgaaatgaattagggagggttccttctttctctatcttgtggaatagtgtcaaaaggattgataccaattcttctctgaatgtttggtagaattctgctgtgaatccatctggtcctgcacttttttttgttggtggtaatttttaaattaccattttaatctcgctgcttgttattggtctgttcagggtatctaattcgtcctgatttaagttaagagggttgtatttttccaggaatttatttatctcttctaagttttctagtttatgttcataaaggtgttcatagtagccttcaataatcttttgtatttcagtggtgtcagttgtaatgtcttctgtttgatttctcagtgaggttatttggattttctctctctttttcttggttagtcttgctaatggtctatcaattttatttatcttttcaaagaaccagctttttgtttcatttatcttttttatttttattttttctatttcatttagttctgctctgatcttggtaatttcctttcttctgctgggcctgggtttagtttgttcttgtttctctagttccttgaggtatgaccttagaatgtcagtttgtgcactttcagtctttttgatgtaggcgcttagggctatgtactttcctcttagcactgcctttgctgtatcccagaggttttgataggtcgtgtcattattgccgttcagtttgaagaatttttaaatttccatcttgatttcgtttttgacccaatgctcattcaggagcaggttatttaatttccatgtatttgcatggttctgaaggttccttttggagttgattttcagttttattccactgtggtctgagagagtgcttgatataattttaattttattaaatttttaaaatttattgaggctcatttttggcctatcatatgatctatcttggagaaagttccatgtgcaattgagtagaatgtgtattctgaggttgtgttgctgtctatctcatttcttaggtctattagtaattttttttttttataaatttgggagctccagtgtatggtgcatatatgtttaggattgtaatattttcctgttgggcaaggccttttacctttatatattgtccgtctttgactcttttaactgctgttgctttaaagtttgttttgtctgatataagaagagctacccctgctcgcttttggtgtccatttgcatgaaatgcctttttccacccctttactttaagttcatgtgagtccttaagtattaggtgagcctcctgaagtcagcaggtagttggttggtgagttcttacccattccatggttctatatcttttaaatggagattttggccaattacattcaatgttagtattgaaatgtgaggtacccttgcgttcatcatgctctttgttgcctgcatagtttttttttgtttgtttttgtttttttttgtttttttttttttttgctttttaacttgtatttttgctgtatagtttctgtgtgatttatgctttaaagaggttctgttttgatgtgttcccaggattagtttcaagatttagagctcttttagcagttcttgtcgtggtggcttggtaacagcaaattctctcagcattcgtttgtctgaaaacgactgtatctttccttcatatatgaagcttagttttgctggatacaaaattcttggctgataattgttttgtttgaggaggctgaagatagggccccaatcccttctagcttggagggtttctgctgagaaatctgctgttaatctgataggttttcctttataggttgcttggtgcttcgtctcacagctgttaagattttttccttcgtcttaactttggataatctgatgacaaagtgcctatgcaaagatctttttgtgatgaattttccaggtgttccttgtgcttttcgtatttggatgtctaggtctctagcaaggctggagaagtcttcctcaattattcccccaaatatgttttccaagcttttggaattctcttcttccacaggaatgccaattatccttaagtttggtcatttaacgtaatcccagacttcttggagactttgttcatattttcttattcttttttctttgtctttattggattgggttaattagaaggctttgtcttcaagctctgaatttctttattcaacttgttcaattctattgctgagactttctagagcatttcacatttctaaaagtgtgtccaaagttttctgaatttttgattgtttttttccttaagctatctatttctttgaatatttctcccttcacttctggtatcatttttttttttatttccttgcattgggcttcacctttctctggtccttccctgattagcttaataactaacctcctggattctttttcaggtaaatcaaggatttcttcttggtttggatccattgctggtgcactactgtgatttttcacgggtgttgaagagcttttttttgtcatattaccagggttggttttctggttccttctcatttaggtaggctctgtcacagggaaggtctagggctgaaggctgttgttcagattcttttgtcccatggggtgttcccttgatgtagtactctcatccttttcctgtggatgtggcttcctgtgagtcaaactgcagtgattgttgtccctcttctgggtctagccacccagtaagtctacctggctctgggctagtactgggggttgtctgcacatagtcctgtgatgtgaactgcccttgggtctctcagctgtgtgtctcagtgcctgttctggtggaggtggcagggggtgcaatggactccatgagagttcttagctttagtggtttaatgctctatttttgtgctggttggcctactgtcaggtggtggcgctttccagaaagcatcagctgtaggagtatagagagggactggtggtgggtggggccctagatctcccaagattaataccctttgtcttctgctaccagggagggtagggaaggaacatcaggcgggggcaggactaggcatgtctgagctcaggctctccttgggtgggtcttgctgcggctgctgtaggggataggagtgagattcccaggtcactggagttgtgtacctaggaagattatgcctgcctctgctgagccatgcaggttgtcagggaagtgggggaaagccagcagtcacaggcctcacccagctcccatgcaaaccgaagggtcagtctcactcccactgttccccgcgacaacagccccaagtctgtttccaggcagaggggaagacaggcttgaaatctcccgcctcccagctgtgagagaagaaggcttggttcttcccctgctggtggagtctgcacaccagatttgcacaccttcccccaagttctggcaaggaggcttctcatcgggttcatattattacaaagttctgctagggatttctttctccctatgtagttttaccctcacttggctctctaaattggctcagctccaggtaaggtcggaaacttctcccgcaaacagaccttcaacttttccagtggatatgtgtgttcgggagaggaaggtttccctttcccacttctgcagttggggcactcacagtttttggggtatctccagggtcctgcaggagcagtccacttcctttagaggatctgtgggtcctctcgggattgctggtttgttcttgcacttgatctggagctaaaattcacaatgcaagcttctgcaagctgttctgtccggagctgcactctagtcctgcctcccatctgtcatgatgatcctagaattccatctcctctctaaaaagtacaaagcacacacatttactctatgtacctctagtaagagctttgctttgtgtttgtctgtcagtcttaaaggtagcttctcatgcttgagcagtctatgactaagtggtttatttgtttaaccacctacaatataacataatagataaaataaagtaaataaaatataaaatttaataaaattttcacacaaatgagaaaagcgggaaattaataaacagtggttttactcatcagagtttgcaaattctttctgcatggaagggtagtgagctccttggtcagccaatctgcatcatggaggattttatttaacagtttcatattcttaagtaaattacttgacatttgctattgacattgggaaggacccttttttggtggctgctgtaggttagggacctacttcccattggtgaaattttggtggtgtaggaaacgcttaggaattgggtatttccaagcatttgccgccagtgttagggtttctctggaagaaaaaatttcttacagccttgggaggtatgcagctaatctgtatttagttaatgatatagactagttactggaaactgagaccatgttgagcatagtctcaagagaagtgtgagtttgtgatttctgtttcttagtattagacctcaatggcttacccatattttaacttttagcttaatggtttgtaagtggcaccgaataattagttgggattggaagtgataactaattctcctcatatctctaggtagcaggacagggaatttttttactgccttttaaataagataattaaattggagttactgtcatttttacctacaatatcatagctaacaccttcttctggcagaaaataccactcaaagttcttgggaaggtcctggagatcatatcatagcttcccctagattctattcttattttcaatgttcttgtcagcctctctgagtttcctttgcactaactttttcttggggtaaagattttgccttttttgattttcaaagctcatggttatttgaatctcagctgtctcagattgttagatgcagatataaatcaaggttgtattttcttttgtctttgcttttaaacaggtaagcttgagagaactggctaagatattccagtatcctgacatttttctaccaagttccttaaagttatagtctcagtagacacatgagtctaagagtatgacaggtaacagtttaaccagtttaactgtctacttttctactgtatagcatggatggactaccctatagctactgtaaaaaacactaacttccctgttgtccacctcaacttggccaattcaactttttaagattttccagtaacaacaactgtcttccatattagccaagatatttttaggtgaaagtgacagcaacccaattttaatttaaagaaaaaggtatgaattggttcacaaatctgaaaaggccaagggtagcctgaggcatggccagatctgaatttgtgagtgctttaatgacatcatcacaaatctgtctcttaccacttttacctctgttttcctttgacttttcttcactcttaggcaacatcttttatgagctgacaaactgtggctataagtgacttcaggcttttcatcttctaacagtttactacccccaatggaagaagctatcttttttttttcaagtactgagctgactttgatttgcctaacttgggtcacatgcccaatcctgtgctaatcattgggtgttggacttttagtagacaggcttgggtcacccttgaagatgagggatgaggaaaagaaataaaaaaagaagttcacttattataaaaggggtattgaagaagcaaacacaaccagtgttcatcactgtcatgaggaacactgggccaggagtcagaagaaatatagtctgaccacagttccattactttctagccatttggccctttctgagcctagttttgttatctgtaaaataaggacattaatactgaactcaattatttcacaagatttttttaataacaggtgaggttttatatatagcctcaaaactcatatgtagataacagatattattaaaatatttttgaatgatctttatactaatgcttatgttcctttaaaatacattatttttatactaaaaatattataaccaaaaataataaaataatataggcctactcccagaaaattgtattaccattttgaaataattcctcccttcctcccttcctccctccctcccttccttcctgccttccttccttccttccttctctttatccccctgcacaaacatcttctcatatagcaatataatattcataattctcaactttaatagcaaaacttcatccagcaggcatacataactttcctaaccattcttatgtggttggatatttagaatatttattatttttaacattataaataacacttcaatgagtgtacacataattgttttcatggactttcccttagtaggaacatttctttttttaaactggggacaaggtctcactttgtcacccaggctgcagtgcaattgcaagatcctagctcactgcagccttgaactcctggctcgatatacagtgtcaaatgtcttcccaaaataattgtggcaatttacaatgtcctcagaaatatatagaggtaaaaatttcaataggctgtcaccagctgtggtagatgctgcccttggcctgctcatatttctcagactataccattctagtctactcaggtgacttccaattgctgatgcctgttatctctatgcttggagtttttctgagatgcagaaggcatttctctccgagtgtgtgctgcaagtcagaaatgctaggaaattaacatgccttgggagcagtcctcaaatagtggctgatgagagttggtgaaaagataccctttgaagtgtgtgctttatactgatccacagaattaagctctattcactcacagtggtagctggtttcataatgcactcttgattggctgttttctgttccttgtttctattccccagtcctttgccatggttccctgtattgtgcagataaactatctatacttgaagcttcatctcagagtcagcttctggagcaacccaaaataaaacaccagcattagttatcttcactcaatttttaaattagctaatttaatagaaaatgagttatcaattatttgtagcaacatagataaatctgaaatactattaaatgaaaaaagcaaccttcaacgaatttataagtagagtagtattcataaaagaactcttataaaacaacataggcaaaataatgtatacatgcaaagcaatgagatacatgcaaaaattttcataagtgtaaagtgatataaaatatgtaacaaaacacaccaattgagcatgcttgaaaataataaagcgaaattcagaattacaataacctctagagagaaggaggttactgtagttaggaatgtcattgggagggttatataaggaggcttcaagtgtattagtaatgttttactgtttaaagttgcattacagttctgtatagctatatcactctatgtcctttttttgtgtgcctgaaatatgctattattaacattattaattaaaatatagacagaattaattataaaagttgtacattttcatacgtcaaaaaacgaatgactctttttcttctttatgtttttggtattttccaagtcttttatcacaaacaacattgcatttataataaaaaaaaaagtttcaaaggtaatatgatgaaaagaagcaaatttaatttaaagtaaaaaaattactgacaatgtttacttgtttaaaaagatacattctggacagaatagtgtgtagagattcacaccataaatttttttccaagaaccagtgcaggaatttaccataaaatctgaaagaatccacagagcctttgaaataagtgacaggctgaagcctactccatgagacaggtgaaaaactgttaagtccccagagtgtgatagaggagagtctgcctccagaggacatatccccaccaggaaatctgaaaatccaggtcttgggagaagaccttaaccttacccagagctggaacaaattgagggagtggtgtgcaatataaaagtagaagcagtagcaggaagtgccttgcaagcaatcccagtcttcagtgtgaacccaagaaagccattactgactatatctcacaggggccctcaaagaagtcagccagtgagctcaggaagtgggttgcaggtgaaagaagctccccactgaattttgtaatataatcttgagtaggaacaaactcccttgaccagaacccagggttggaagtggggagcacaaatgggaattgcactgcagacatgagcacaggagctgggtgcccagccttgtagagagacagggataggtgtggccagaaagtggaggttgctatctctgtggaaagcttatggcctcgggcaggtctgagttctgtgtgcagactgcctggatcttaacccagtgctgttagtggagcactgtgggagtgagattggcctcaccaactgcatgggagctgggtgaggcttactgctgcctgatactctccactccctttgcaaactcttctgtgcaccaaaggcagttatactcccctctggaactttatcccagtagcctgaaaccctctccttgaccctcatagggcctgtggctagccccacccaaggagagtcagagcacagacccgcctaaccctatccccaactggctgtgcccctccacccacgctgatagcttaacacaaagaacataaactttaaggagctttatagctccacctattgcctgagaaaccagaatacttcccctgggtaacttagggcaaactcaaatcctgctgctactaccacagctggtgctcttttaaagtgccatctcttggctggaggccaaccaaaacagtccattacagcacctctaggtagaataatactgtgtccagaatggagaaaacggctgcatgacctcagctgtactcatcaccactgcgtacaacaccctggctaaccaaaggttctaagtgggtccacgtgacaagttcacaataattatgaccagcacttgagaaagccagcacactaagcctatcaaccaaggaatctcacagagtctacgtcactcctctaccaccttcgtcagaaatggtgctggtatccactgctgggagacttgaagacaggtcacatcactgaatcccttgcagacattcctcagcaccagtctggagtctggtaactccactcggtggctatacccagaagagcaataacagttactgtagtctggctctcaggaattcccattcttaggggaagggagagagaaccacatcaagggaacaccccgtggaacaaaagaatctgaacagcagttcttgagtcccagatctttccactaatgggaagtttcttacagcagagacacaattacagtgctgctctgaacctctatcccaacagggaggcaacctctctgatcattaagggtcttggagacggtgtccttattcccatgagtacaccactgaagacacagctggggcttctcccacaggaatgcaacatggatgcacctacagacagctttcctagaacaagtcagggtgattgcatccccacaggaagagcactttccaggtcaggctttcatgagaggcagagtcacaactcctctttacttagaatatcaacattcttacagatgaaaagaggagcctgtctaacctgaatagccagaacactgggatagaaatgaagctgggaagtagatgccttccctgctggcctggcagggtagctgaggtgctcccacctttcaacctgataaaacctctgtacatctaattgagggcttcccagccaccttcaacaaggctgggacgtctgcccaccattgggtattacatctacccacctgctttagctacaaccagtgcctacccagggataactcccctactaacctgaagcctggatcatcaaatcagtaaataaaacactggagaaaaattaagtaaataaaaaagcatacaccatgggagaatgagataagcttcaaaaatccttgccattccaaccccatatgagacagtgaacttgcccacacaccatgaacataactactacaacaagcatctggaaaagccagtgcacaaagaccctctataactaaggaagtcatacagagtctttcctgctaaaagcaccaagaattaaattagcctgcaataaactataaacgttaaagtcagattcctaagagggaaaaaaagaaattaaataaaaaccacagtcaaataaaaataaattcaagaaaattttgaagaaaagtctatccaaatgaaaaggaaccagaaaagtaattctggtaatatgacaaaagagagttctgtaacacccccaaaagatcaaactaactccccaaaaattgcttcaaaccaagatgaaatctttgaaataccagacaagtcagaaggttgattattaagctactctaggaaataaccagagaaaggtgaaaaccaacataaaaaatgttttaaaattcaggatatgaatgaaaaaattttcagagagatggatatcataaaaaaaaacaatcagaacttctggaaataaaagacatacttagagaaatacaaaatttagtgaaaatttcaatattagacaagaacacgtagaataaataatttcagagcttgaagacaaggcttttgaattaacccaatcagacaaagataaagaaaaaagaagcaaaagaaatgaaccaagtttccaagaaatatgggattatgtaaaatggccaaacctaagaataattgatgttcctgagggggaagagaagtctaagagtttggagaacttattttaaggaataattgaggaaaacttcccttgccttgctagatatacagatatcaaaatacaagaagcttagattcctgggaaattccattgcaaaaagattatcaccaaagcacgtagtcattaagctatctaaagccaacatgaagaaaaggattttggtagctgtgagacaaaagcatcaggtaacctataaaagaaaaactatcagactaacagcagatttctcagcagaaaccttacaagccagaagggattggggtcctatctttaccctccttaaattgtcagccaagaattttgcattctgcaaaactaagcttcataaatggagagataaagtatttttcaacaaatgctgaggaaattttccactaccaaaccagcactacaataaatgctaaatggagttccatatcttgaaacaaaaccttgatctatatcaaaatggaacctccttaaagcataaatctcacagggcctataaaacattaacataatgaagaaaaacaaagtatctaggtaaaaactaatatgatgaatagaacagtacttcacatcttaatattcaggttgaatgtaaatagcctaaatgcttcacttgaaaaggtacagaatagcagaatggattaaaaaaccgctaaccaaatgtctactgtcttcaagaggcccatctaacacaaaaggactcacataaactcatggttaaggggtggaagaaggtattccacgcaaatggaaactgacacataaactcatggtaaaggggtggaagaaggtattccactcaaatggaaactgaaagcaagcaggagtcactattcttacattagacaaaccagactttgaaacaatacaataaaaaaagacaaagaaggacattatataataacaaaatgattagttcaacaagaagatattacaatcctaaatttatatgcacctaacacaggagctccaagatttataaaacaattactgctagatctaaaagcaactcaccctccaaactatacaaatacatggaaattaaataatctgcatttgaataattttggggttaataatgaaattaagatggaaattgaaaattattggaaatgaatgataaagtgacacaacttatcaaaacctccgggatacagcaaaagtagtaccaaaaggaaagctaatagtattaaatgcctacatcaaaaagtctgaaacagcaaaaatagacaacctaatgtcacacctcaaggaaatagagaaacaataacaaagcaaatccaaatgtagcagaaggaaaaaaaaaacaaagatcagagcagaactaaatgaaattgaaacaaaaaaaaaaacgataaatgaaacaaaaagctggttctttgaaaagataaacaaaattgataaactattagtgagattaaccaagaaaagaagagagaacattcaaataagctgaattagaaatgaaactggcaatattacaacagatactacagaaataaaaaaataacattcaaggctagtatgaacacctttatacacacaaactagaaaatctagaggaaatggataacttcctggaaacatgtaattctcctagatcaaatcaggaagaactagaaaccctgaacagaccagtaacaagcagcaagattaaatcagtaatgaaaaaattgccaacacagaaaatttcaggaccagatggattcatagctgaattcaaagaatattcaaagaagagttggcatcaattctactgaaactattcgaaaagataaagagggaatcctccctaagttattctgaagccagtataacactaataccaaaaccaggaaaggacacaagagaaaaagaaaactgcaaaccaatatctctgataaaaacagatgcaaaatcctcaacaaaatactagctaactgaatccaaaagcacatccaaaagataatacatcatgattggctgggcgcagtggctcatgcctgtgatcttatcacttaaacccagaaggttaaaaccagcctggacaacatggcaagaccccatctctacaaaaaatacaaaaattcgctggtagtacacacatgttctcccaggtactcgcgaggctgaggtggaaggatcgcttgagcccatgaagcagaggttgcagtaagctgagattgtgccactgtcctccagccgaggcaacagagttagactctgtctcaaaaaaaaaaaaaaaagaaaaagaaaaaaaaaagaagaaaaaagagataatacatcacgatcaagtgggttttatctcagggatgcagggatgattcaacatatgcaagtcaatatatgtgatacatcacataaacaggattaaaaacaaaaataattatctcaatagatgcagaaaaagcatttgacaaaatgcagcatccctttgtgataaaaccctcagcaaaaataggcatagaaaggatttacctcaaagtaataaaagtaacatatgacaaatcaacagccaacatcatactgaatgggaaaaagttgaaaggattccccctgagaactggaacaagacaaggatgcacactttcaccacttctgtgcaacatagtactggaagttttagccagagctatcagacaaaagaaataaataaagggcatccaaactggaaaagaagaagtcaaactatctctgttcacccatgatatgatcatatacctagaaaaccccaaagacccatccaaaaagctcctgcatttgataaactcagtaaagtctcaggttacaaaattaatgtacacaaatcagtagcactgctatacaccaacaacaattaggctgagaatcaaatcaagaactcaatcccttttgcaacagctgcaaaaataaaaataagaacacaaaaatctaggaatatccttaaccaagtaggtgaaagatcacctacactgctgaaggaaatcatagatgacacaaacaaatggaaacacatctcctgctcatggatgggaagaatcagtgttgtgaaaatatccaaattcacaaataaatctacagattcaatgcaattcccatcaaaatatccatcatcgttccccacagaactagaaaaaacaatcctagaattaatatggaatcacaaaagagcctatagccaaagcaatactaagcaaaaagaacaaatctagaagcatcacattacccaactttaaattatactacagggctataattagcaaaacaacatggcactggtataaaaataggcatatagaccaatggaactgcatagagaacccagaagtaaagccaaatacttacagctaactaatcttcgacaaagcatacaaaaacataaactgtatattcaataaatggtgatgggaaaactagcaagccacatgtggaagaatgaaactagatcctcatctctcaccttctacaaaaatcaactcaagatcaatcaaagacttaaatctaagacctaaaatcataacaattctggaagataacatcagaaaactcttctggactttggcttaggcaaagaattcattattaatatcccaaaaacaaatgcaaccaagtgaaaaataaataagtgtgacctacttaaactaaaaagcttctgcacagcaaaagaaataatcagtagagtaacagacaacccacagagtaggagaaaatatttgcaaactatgcatctgacaaagaactagtatccagaatctacaaggaactcaaacaaatcagcaataataataataataaaacctgtcaaaaagtgggcaaaggacatgagtaaacatttttcaaacgaagatacacaaacagccaacaaacgtatgaaaaaatgctcaccattgctaatcatcagggaaatgtaaattaaaaccacagtaagatattaccttactcttgcaagaatggccgtttaagtaaaaagtcaaaaaacaatagatgttggcatggatgtggtgaaaaggaaacacttttatattgctggtgggaatgtaaattagtacaaccacgatggaaaacagtatggagattccttaaataactaaaagtagaactatcttgcagcaatatgtggtagatccagcagttccactactgggtatctactcaaaggaaagtaagtcattatatgaaaaaaaaaacatgcacactcatgtttaaagcagcacaatttgcaattgcagagatattaaaccaacctaagcgcccattgaccaacgagtggataaagaaaatgtgatatatataccccatggaatactactcagccataaaaaaggaatgaaataatgacttttgcagcagcttggatagagtgagaggccattattctaagtgaagtaatgctggaatgggaaaccaaatattgtatgctcttacttataagtgggagctaagctacaacgatgcaaaggcataacagtactataatggactttgtggactcagagggaatagttgtgggggtaaaaggctatatattgggtacaatgtgtactgcttgggtgacaagtgcactaaaatctcagaatttaccattaaagaacttatccgtgtaagcaaaaaccacctgtacccccaaaactactgaaattttaaaaaagaaactactgatacaacaacatgaatgaatctcaaaagcattactgtaagtgcaagaagccagacacacaacagtacacactacacaatgtcatttatatgaaactctaggaaagacaaatctaatcaataatgatacaagaccagttattgcctggaaccagggacagcagtgagggaagaagtaaaagaaacattttgagattatggaaatgtcctataacttgatggtgatgatgattacatggttcttttaatttgtcaaaatacattaagccttacacttaaaatatatattttggctgggcgtggtggctcaagcctgtaatcccagaactttgggaggccgaggcaggcggatcacgaggtcaggagatcaagaccatcctggctaacatggtgatgatgattacatggttcttttaatttgtcaaaatacattaagccttacacttaaaatatatattttggctgggcgcggtggctcacgcctgtaatcccagaactttgggaggccaaggcaggcggatcacgaggtcaggagatcaagaccatcctggctaacatggtgaaaccccgtttctactaaaaattcaaaaaattagccgggcgtggtggcaggcgcctgtagtcccagctaatcgggaggctgaggcaggagaatggcgtgaacccgggaggaggtgcttgcagtgaagcccagatggcgccactacactccagcctgagcgacagagcgagactccatctcaaaaaaaaaaaaaaaaaaaaaatatatatatatatatatatattttcttttgtataattatacctcagtaaagttaattttaaaaagaaaaaagtaaaaggaactatttaacatagcacatcttgattttgttaggcatatgtgtattatcgcatgtgtttttaaattaagtataacttgcctggctttgtgtgtaattaaacaaattgaaaactatcagaaggagagcaaataaaggaaataaatatgacattttaacatggtggatctaaagaattcctagacagccaccaggtctatctctagcattcatacatttcttcatatattaattcattaaacattggaacacttaccatgtgtcagggactgcgccatacatgatgactctgtctttaagattttacaatacactggaaagacaaacaataattacactataacattatatatggggctatataaaaaatgctgtgggtacataaatgttggggccactggtggcttgatttcagcatttagccaaatagtatcatacgcagatttcaaatcagaagttctagagaataaaatgagattaaaacctgacctacattacttttaagttaaaaaaaagtatgtggaataatttttcctgggatgagggacgcagggttggagaaatgcaaagaaaaagcaatttatggcccttgaatttggattcattttgtttgtatattttttcttagaagtttatagtaattcattacactgcttttcaaatagatttgatgaacatttgtgataaagacacaaaaagatgtcagatttgtgagttgtcaaatcaagtccaaattaatcttgaaaaaactacccatttcttctcaatatccatgaaaaaaagaaatacagataccagcactgaggggaaataaaatggttttatctcattttatatggggaagaaataacatttattgggccgggcgctgtggctcatgcctgtaatcctagcactttaggaggccaaggcgggcagatcacgagatcaggagatcgagaccatcctggctaacacagtgaaaccccgtctctactaaaaatacaaaaaattagccgggcgtggtggtggccgcctgtagtcccagatactcaggaggctgaggcaggagaatggcgtgaacccgggaggcagagcttgcagtgagctgagatcacgccactgcactccagtctgggcgacagagcaagactccgtctcaaaaaaaaaaaaaagaaaagaaaagaaaaaagaaatacatttatttagaacacattaactgggataaacagacaaaagcatagttagaggagttttttttttgtaaaatttaagataaaggggtaaaacttagtgggcaggaattattacaggatagttttaaagagagaaacaatctgatttatgagaagttaagaaatactgtttaaattagaaggaaatgtagatagaaatgtccaggaagatggattctactttaaatgtgagtaaaatgaggctgggaaccatggctaaaaattaaatcagggttcaacgaaaacattttcacaggatttggaaaataagttagcatcacgtatgatgcttctgcttcaaagtggtaagtttgctacttacatgaacaaaaaggtgacatagttgttttttattgtgtatttttatcttattttatttaacctttccttttcggtatctttcaagcattttgaattctacgtgttcaaaatggagctcatcaatttcccatgcaaaactaattttcctctggacttaatctattgtgatgaattataacactatctagtcatctagatgccaaaatgttcttttgtcttttcaattccctatattaaattatttgcctagttgtgcaggttctctttgtctaagccatctttccttccttcccatttccgcagtcactaccctgatcttggtctctgttgctccttgcctgggcccacagagcctgtctcacattgtgcatggttaataatgttactcttgatagccaggcctaattatatcacttcctgatatggcttggctgtgtccccacccaaatctcatcttgaattgtagttcccataatctccatgtgtcgtgggagggacctggtggaaggtaaacgaatcatggggtcagttaccctcatgctgttgttctcatgatagtaagtgagttctcacaagaactgatggtttcataagaggcttttccctcttttgctcctttttctccttcctgccaccatgtaaagaagaacatgttagctttccattctgccatgattgcaagtttcctgaggcctcccagccatgctgaactgtgagtcaattaaacttctttcctttataaattacccagtcttgggtatgtgttcatcagcagcttgagaatggactagtacacttcccctgctccaaccattttcatgacttctcatgacttcagaatctactcaggagttcaaggttgccataatttacctaccacctactttccaaagtttattttcaatgacttccttatagtcttcttacattctaataaaactggcctttccactgatgccctgacacaacacctgcttttccatcttcatatctttgcaattgtgtttgcggtgcatggaatatcctccctttcctcctctatcccatatgccctaacctatcttcatccctctgtaaagatctctggtacatcaaattcttagggccttttctcttgtttaaacttttacaatacttttgtatttttgtgctgcatcctttctgttacaagaacatataattttaattttctgtactacattacagcactttccagagcaggaatttgtatattactcatatttatggctctttaatcaataattagtaaaaaagcaaagtattattttttaaaatatcatgtattttatgatttattcaaattttaaaatttgagatgtatcagttcctaatgaaaagtactatacaacaaaatgaaaattactctctagtattttctctaggccccatgtatcaagatcaggttgtaaataaagaatatttttactgcaaataaagcagcaacctcttcaggttcagcttggagaaatctgaattattctcacacaagtagccacataaataaatcttatctgcaccttgacacaatgtgtttaacaaacgtcaattaaacacagctggtttcttctcagtcagagaaattaaggtgcaaataaaagaagacatcgtatatagatacatattgtagttagccttgttctaagattattaaaaataggtcttaaggtgctttctattcagtaaaattaatacctctcatttaatttttaaagtaaaaaattatgttcagtgaatttttactgaaattatttcatcactatttttatatttgacctgtgttgctagtttgatatataaaagcatttaaaatttgtttttctatcttcaaaaaaactagaaagttctatgtgaatgtagtcaaattcaaacatatttgcttgaggattcttctttaggcagaaatgtttcacgtggagtctaagcatgcaaacattttctactatcttaaattataaattacagaaaacaaataaagctctagaaattggaacttggttgattttgatgggaaactgggacctctggaaaatgatgttggcatctaatgatgttatttgtttttatctattatattaaataaaggtaattgctaagcttattgcccattagtatgttattcattaagtgaactattaaaatacatttcacctatgttatgctttttctcattctcttcttctgtaaagattaactggctttttccttagcataatattaaagtgaattgtttgcctacatagggtttgccccatctcagattgtaaagcctccctgaacactaggcttttcaggctgctgaaacttggggactggttttatcctgtatcatatctatatgcactatacactacaagcagcagaaaatatattattttgtcttgtatcttcttagttcccagcataccaccttccccccaccaacttttaaaaaagattgaatctgttttagtgagcctccagaatgaaatgttaatggataaacgaaacaggaagggttgtttgtttttaccaaattgcactgaataccttgtctgacataacctgtggtcaatcttttcttttacaccctctagaaaacatgtgagtcatagttgatggggaaacagtcattatcatcaattcttgtctgtgctaccactaggtggatggtgcagattctgtattacagactgtagcctgccaaatacccaggatcttccatcaatcacaggctggagatatacctcgagtcccaccagagccagggacttttagttattgcacaggcggaatatcaactaactcttcaaatagctctagtaattttgtggaaataaaaatttaactactgcgtcacactgtgatttggaagaatttaaccattataataccatcatcatttttctacatagaggacagaatagatgtttcaggtctgaagcaatttcttggtattgcaatgtaagatttcctgggaaatgttggtttcaatgtagagaatttcttcctactttatcagtcatctcgaagttgtttttgttataacatttcttttacaatataagactatcctttccatcttgacttatgattgttagttattattaaaactaggcattgttaagcatgaaaagctgaaaagaaaataagaattaatgcaaattacttggtcagagagcctcacaaaggacttaaatagatttggaatgaaaaatagcaagactaggttaatttaaataacttgccatataaatgttggaaagcaattaccaaaatccctaaaattttaagcatcaagattaaaggtttaaaattaattcattttctcttacacaaacataatcctccttttaacgtgctttgttcttttaattctgtgatttacctaggtgcatttgcatttattgtatttttttttctgtttttcttccttatgatgtcttaatctcctttgtgggcagggaccattaaaaatctttaattgtgccagatgtttctgactaccgagtcaacattcactgattgagccatgaagattgagctatgatgatactgccatctttctatccattacaaatgtaaagtttttttctagctttctatctctatgggcaagtgtggtctcaatggaaggtgagcaatgagtgtaggtgtgggatatgacatcattttaattttttaagtgtttatgttctcttacaaatttatactgcagagatggtcttttaccactatgagccatataacgtgatgtacatagcagttgcttgaaaaacatttgcacttcttgatgatagatgaggactttgtagttgcttattttttgtcatctttatggaactaacatggtaacagttatatcctaatagaaaaaagttaaagtcctaaaatcatccaggtcattcttaagcagggctggaatgtctcagaatttagtagctattcttcaccaagcagaacttagtcataccactgtggacttcccttattttctcctatttgccacaaaaaaagcaagtgaaataatgtaagagagggataaggagatgtggctactgtttaacaacccatccagttgttggctcgtggctttcatccagatgagaatgattaggaatgactccaaaggccaaaaaatgtttatattccataatgtgacattaaacatttctgaatccaaagtctgaattttatttttctcaaaagccatttgcactaatgtttgtattataaacatgtccctcaaagaggttgagctagaaatggtattatctgatggaggggctagacatatagatatgtaaccagttatcttttctatcctatgttcttataacagaagctaccttctttgaagctgtgttgaggtgttgatagaaagtgcatttcttttgtactgcttgtgataaaggaactcatggccaggttaatattacatataaacatgtttaagtacagactgtaatagaggctccacgaggtcagggatttttgtgtttttttgttctcttatgtatcccaagacctaaaacagtacctaacacatagtaattactaaggaaatagttactgaatgaaagactagaatatggtcacattattcttgcattttgttttctttggctatgcaagttgtatcatattttcctgttttcataatcatcttctgaatattgattaatacttagtcatatgaagaaatattaatataagatatagaatagtcttaacaatcaagatagaaaaaacatttataccccaagtgttttctttcttttccttttttctatttatcttaaataggttgattatgttttgatttcattgtataatacactgttgaggtcaaacaaacgaagctttagtgaagattattttgaaagaaacaatagagcatttaataattttatttgcaaaatatatttcagaaacattttatttctagccttaaacagaaatcttaataatatcttctacattatgcaggcagcaaactgtgagataggcatgcccaagcatttctagggaaggacttatacattcttaatagcaattttaattgttcccagaattgagaatttttattctaataatgacatgggtaatatgccaataagatacatattaaaggtgagacctaaaattcatcttgcaaaataaaattattcacaaatgactttctgaaatacctctttaggattcttctttgctttccaggctgttccacgaaatttttgctgctattactttagtatgctactacaccccttcccactgcttactttaagaaaatcccctcacactgaatacgcacatatacattttgtaatgttaattctagtctgtcttttcagttatcttcttggcacaaatatcacctctaataaacaccattaatcataatgatggtattaatatcaataacaatgattacccattctagattagtttattcattttcattgacttaaaatgattacttcttgacttgagaggtaagtagttccttagagacctctgagactagtgagaatagagcaaagaggccaactgttaggcttgtcagacttccttttttatgctgggctatgccccttttcgcagtttcacttggatgaagaactggagatttagtagttagtgtctttgcagtgtgggagtgtctaacttgggaagtcatagaagaatgagggaaagtcttatctatttatttctctggtatttttctggtagctgaattgatttaattttacccgtgagagattacacatcattaaggattgtgagtgaggcaaatggctatttaaaggttgacagtgtgaaaaaactaattaaaacatgcacagtctaatcagaaagaaaatatatgagaaaaggggagaatgtaaaaatggttaagttattaagcatgcacaagatctcaggatagtatctccatcttattgctacatatttcaccaaataaggattatttttttcttatctcatggtaacatcaaatgaataagttcaaatttacatctacaaaccagagattaaatatgtcaataaaaaagtgaaatatctgttggaaatgataatcataaattaagtaagccataaatagaatttcaatgaggtgttttgatttgtgtgaatgaattcattaaataaatattatagcagcaagttagaggcctgtaatatactgactaactacctagtgggattcttttccactgcattccaaatttataagaaatacgcaaaaattaagtaaagaaataggtctcagagattattaacttttatgtcatgtagacttaaatacagttttaatgaacagaactgaagaaaaattgaattatatttaccattttttatgcttagaaaagtggcttcaatttattaagaaagaatcttgaaatggaagattgaaactaagtatgaattgtctgtttaatttactgttatctcaaaatattaaatttattaaatactgtattcacaaagtgttactgagataggacgtgggatgcaactgtggaggggctcagacactgggacacaatggggactaggtaaaacagggatggggcagaaacatctctccataagacaagcccaccaatgtgccatgtcagtttaccattgccatggcaacatctgtaagttactgcccctttccatgtcaataacctaacagcatgaaagttaccactctttttctagaaatttctgcataatctgtcccttaatttgcatataattaaaagtgggtatacatatgactgcaggactgcctctgagctgctattctgggcacactgcatataggatagccgtactctccaagaaacagcacctccgctgctgctgtatgctgtcacttcaataaaagttgatgtctaacaccaccagctcacccttgaatgttttccttagcaaagccaagaaccctcctgggctaagccccaattttaagacttgtctgccctgcacctttatgatcaatgcaagagtctcctgtacaataaggtatacaaatagcagcagatggtctactgaataattgaacatctttcaacttcacttggcctgttaggactacccttcacctggtacttttctaacagttgacttagttgttgggctaaagctaaaaggggccagagataattttaatttcttttctctctcactggaatagaggtctcacaaggtcaaggctccacaaggctcagtgctaaaggagaggaatcttaaaaatggtaaaaattgttatagttttctttttggtctttaataagattaaattcaacagtctaaagctaaagaaacattaagtctatagaagtgaaattaattatgtaagtgaacactgcaaattattgaaaaaacaatagttaaaacctaatttctttacttctggtccaatgttctttccatgccactatcctgcttcctccaagcattttgttacaaaattttttaaaatgtgcaacaatatattttcttgaattatccagaacggttattcctaatgtgtttggggtgttattacttacgtgttatgttaattatgctgaacctttgtaaaatgtatgtataacttgtttttctctttctctctcttaggtttttctttcgtttaaagatgacacactctgaaattaatttgattttgagatttgagaacttggacatacatacttcctatggaaggtaacatctttttggtagtgatcacgttttgtcatgtttatgtgcctagcagctaatagaatgcctggtgcataataaacattcccataactgaattaaacaagttgatacaattgacatgttttgtgaaatcttgctttaaaaatcatctactcaagagagtgcttcaagtttccactttgtgtgggtagacactgtctaaattgaaagtaaactgtgatctgttgaaccaaggatggcattatcaaacttatttatggttctgtcctggttaggtttttcattatttgtgttgtgattgttaagtgcagtcttgataccatcatatgatttttctcattttaatgtaactatattttctataatttattcccatctgtcctttcagctgactgataattccacattacaaattacgttgtctttattttgattcatgtttttgtcctcatatagtccttttgcctttgatgctactacaacttcaaagagagtttaaataaatgaagagaatgtgtaggctcagtgctaaagagcagaaatcttgaaaaatgtggattaaaaaatggttatatttttctcttcagtctttactgagtattaaattcaccaaagtctctttttgagaaagtcctttccctgtacttcccctctactgaccccttctttatttcgcatgtgtgtgtactccttataattgatgatatagccaagggaagggcttatgtttaggcagacaacggagcagatgggtcttaaacagatttgggaagctagaatctggagaacataagaaacaactccaagaactctctcagtactgggcactgcatttccaggaaattacagctttagggccacagaaaatatattaagcaactgttataacaaatttccctctgcctccacctgggtggggtggtaggagggagcgataacttcactccagtatataatgtttgcagagaagggtaccaagcagcctctttattaaataaaacaaactaaataagcaatgtggttttttttttattgtactttaagttttagggtatatgtgcacaatgtgcaggtttgttacatatgtgtacatgtgccatattggtgtgctgcacccatgaactcttcatttagcattaggtagatctcctaatgctatccctcccccgtcctcccactccacaataggccccggtatgtgatgttccccttcctgtgtccatgtgttctcattgttcaattcccacctatgagtgagaacatgcggtgtttggttttttatccttgcgatagtttgctgagaatgatggtttccagcttcatccatgtccctacaaaggacatgaactcatccttttttatggctgcatagtattccatggtgtatatgtgccacattttcttaatccagtctatcattgttggacattagggttggtttcaagtctttgctattgtgaatagtgctgcaataaacatacgtgtgcatgtgtctttatagcagcatgatttataatcctttgggtatatacccagtaatgggatggctgggtcgaatggtatttctagttctagatccctgaggaattgtcacactgacttccacaatggttgaactagtttacagccccaccaacagtgtaaaagtgttcctatttctccacatcctctccagcacctgttgtttcctgactttttaatgatcgccattctaactggtgtgagatggtacctcattgtggttttgatttgcatttctctgatggccagtgatgatgagcattttttcatgtgtcttttggctgcataaatgtcttcttttgagaagtgtctgttcatatccttcgtctacttgttgatggggttgtttttttcttgtaaatttgtttgagttcattgtagattctggatattagccctttgtcagatgagtagattgcaaaaattttctcccattctgtaggttacctgttcactctgatggtagtttcttttgctgtgcagaagctctttagtttaattagatcccatttgtcagttttggcttttgttgccattgcttttggtgttttagacatgaagtccttgcccatgcctatgtcctgaatggtattgcctaggttttcttctatggtttttatggttttagggctgatatttaagtctttaatccatcttgaattaatttttgtgtaaggtgtaaggaagggatcgagtttcagctttctacatatggctagccagttttcccagcaccatttattaaatagggaatcctttttgtcaggtttgtcaaagatcagatagttgtagatatgcagcattatttctgaggtctctgttctgttccattggtctagattcaatgccatccccatcaagctaccaatgactttcttcacagaattggaaaaaactactttaaagttcatatggaaccaataaagagcctgcattgccaagtcaatcctaagccaaaagaacaaagctggaggcatcacactacctgacttcaaactatactacaaggctacagtaaccaaaacagcatggtactggtaccaaaacagagatgtagaccaatggaacagaattttttgtagttttttaaaaaatcacacattttgcagccttcgtgtatttgtataaatatctgtttacacattgctttgttttctggtattatttcttgttaattccttaaggaaacattgtagactcttatatatgccttgtatattcttgttcagtgaatgaataacttaagaacagaaatatgtcatgtagatatataaatttctgagaaataatctagtcctatctccaaattactgaagacaaagaaacagaaacttggagaggctgcacaacttctaatcagcagcagaaagggttagtcttggtttcttttgattcccactgcaatgtgttttccatcagaaaaatacaactgctgccaaactgatagacttcctataactctagactacaggattgaagaggttgttattttagtgctgagcctttatgacctaatataacttcctagcacaggaatatctcttcaactaagatgtatgccacaacctagaaattttacttctcaatatctaccctagagtaatgcatgtttataaggattcataaaaaaggatgttgcagcaatgtttgtaataataaagttgtggagagaacttaaatgtttttgcgtaggggaatggttaaataaatgttaatatttttattccatgaaatactatgcaacaatttaaaagaatgagtcatacctatgtttggcaaaaacagctgaattccaggatgttgtattacagtgtgtacaacacatagccatgtaaaaagcaatattatataatatatctagatccatgtgatgtgtgtgtaaaagcattaacaaagggtgggaattaaatatgttaaactgagatagagatagtcacctatgaggatggtgggactaaaagttgaaggtggctgtcaaaggtgatttgatttcatctccatgtcttaaatttgtaaaaaaataaaatgtatttataaatgtatcagtgtaatgtaaaaacaagttggttaaagcacattatccaataaaagcttaatatgtccctgtttgacatgatcttagactaggggcaaggagagaatatgcagatgtgggaaaagaggttgtcattctaggccggctcatgtttcacaaagcagataacataaataagttattgatatttcattattacaggaaaaagaaaataacaaagaataagggggcagcaatgaaagaagacagttaaggtagtcacgtttttaccaacagagccaatttagttaataacaggaaaccaattttcttcaagttcaaataagtgatcctcaaatatttgcaatgcatagtctctgttaaagttcagaattttcagtctttggttattctgaaatatattatcttttgatgcttctgtgcataatcataatatatgttttgatattaatagaaatcagaaaaaaatgagtaaaaatcaggacagaacaaaagggggattttaaatacacacttttgggaaaacggtaaagtattcagaaatgccaaattattggtaaggatgagtggtatctgattaaaatattatctttctaagctctgagcctgctgcaggcaaacatgtcattttgaaatgatgccttatttataggaagaagagcttcatgaatagctattttacataaaaaatcattcacagtgaaactttgtgaggtttatttatgggaagctatatagtgtggaggttaagatcacaggctcagatgtatctaaattttgaaacctggttccaccatttacagattttaagatcttgggtaagttatttactctatctgtacctcagtttactctttttttgaagacaataatactgcatacctcacagattgctctaaagaggtaataaatgaagtaataaaagaaaagcaattagctctgcaagtgctcagtaagctacagaagagttacttttttctccctccagtggaagtgtataaatgtaggcagactgcaaaatgatagccttttattagtgttctgcaaaacaaggtgtagattatttagctctttagttaacttggtgaatatagacaccaaagatatgagaattttatctccatagtgcatttttcaagtttagagaagggcagaaccatcagatatttctcttggtctagcatgcccaagaaaaaagggagagttggagcaaagccagggagaggctggagataaaggtgatggtggggaggtgatgcatgcttagcgtgtggtccacagggctgccctctgcccacaaagggtaatgacttctgttggcaaagatttgggagaaaagggattgagataaaagtgtagaaggtgtctgccaatgctaaatcactccacagttgtgtggtttctttagaattgcccttgcttatcatggagtatctttcacgagttttgcctttttttaaaaaaaaaaacagacaaacaaaaaaacaaaccctgatttcagacatctgacagattatagtttatccacctattaaagttatctctaaattaggaaattccacaggctccagcttctccttaaaaattgtatagcaaggaaggtccccccccacatctaattcctatctctcgacacacacacacacacacacacaccccccacatacacacacgttttcccagattagacaaacgttttctaactatatgcctttcctatgaataactgaagggctactggaagttactgattttcagtttttttgcattgacatactgatttcctcttcttcctttactaaaatggttaatatctattcaccattctttgcataacaccccatagatttgaacgtctaagtcaattgtcaaggtgttagttgaagtccaagtcaataatccagtattttgttttgtcctttttaaaaaagttaaattatatcttttctcttatcgttttcattcatttagccaatgagattatttttgtatattagacttcattcagtagaatagtattattctaattcaatacattagtatgatgctgagccaaatctaagcatctttcattttgtagaaatgtaacccttcagataaaaatctggttcaaattgatcatttatatgtggtttgtatgtatttatttattatttttatttttttgagacaaaatctcactctgttgcccaggctggagtgcagtggcatgatcatggctcactgcagcctcaacttgctgggcttaagcaatcgtccctcttcagccacctagtagctggaattacaggaattacatgagtgtgtcactgtgcctggctagttttttttttttttttaatcatccatatataaggttttaaaaaacaaagtgaactatttggttattaatgtcctcaactgggattcaacacgtggtattgaaaatgctaacttgctatgtagtctcttttcccttttttttttttaaccttagtttccttttcctgaacttaatgaagattctaacttaatggtcaatttcagtaaacacagctgaggtggttggtacacctatttgattcccctttacattaaaaaataaatctaattaaataattgtatttcatatatgtaatcttttagaataataaatttattttggaagctggcagggcatcatttacatagaggataaataatgaattctaaaaatttttgcaaattacttcctgtaaaatgcaaaggagatggatggactgactagcatactttctggatttaaatttctattattatgactggttttgaacaactgtatgcaacctttccatcagaaaaatgaaaactggtttatcttaagttagggtttgagtaaattctgaaaaattttggtctttaaaagaatcatgaagaagttgcattttaaatatcgtctagcaatatagtgtctgataattttcagtcaagagatcaggaacacattttcaggaaagaaaaatccctgctttcttgaatggtgtcccacatcacttctctcacccacctgaaactttgcctataaattacatttgtcatcacagaaatcagaaaaacgtaaacactaagattatggtgcaaagatgaaagccattgccttttttagagtaaaagaagctttgttaacctagagtaaaagaagcacagtttatctagagtaaaatctcaagggattagccactgagttaaggatgcaagtacagcagtgcttttcaaactttaatgggtttacaaatcaaatagtgatcttgtgaaatgcagattgtgatttagtagttctgagatggggtctgagatcttatatttctaacaaactcccagtactaccaattctactggtttggggtctcaggtaacaataatgtacataactctaatatttggggtcaagtaacgttaacatttttgatattaaatttacaaatgtttagaggtcactggctttcctaaacattcacagactaaagttttgatggttaaggtgtgtggtgtcaagctactattttcagccataaattgtccctttactgagagaatttgtttactggaatgaaactaaatctaacacaccaggccaactgtgtctacagatttgtgcacataggttttggagaaaatagagaatttctttatgtacctgtgctttttaactttctttattttggatgctccagatgacccgatataatccaggggcagcggtagaaaaaagttggctgcagcaagtttatatgctttttatttttttgaaacaaatttatatagactgtttatagataaatattgtagaaatatttagtggggaaatggagacattcattaataaggaaccattaagtcattaagttaatgtaaaagctgagaagactatcaccatagaactgaaaaatattttttatttgtccctctccttgagatgtagcctcagcattgctattgatagtgactttattacgtgaattccagagcacagctcaaaatctgttcccttgttgataatgaataatttgtaaacataatattcacaattgttaaagcttttcaaaggcaatatagatggtatttcaatacaatcctagttaagactgatttcattcaaatctaatgtaaaagccttacttaattttatagaggaatgataatattaattacaattttatatgaaaatttagacataaaaagttaagaacacaaaagttgtcaggaacagagttgagaataggctggttatctcagaatagtgtcctgtagattaaggatggatctgccttcccaagcccactgactcaaatgttagtctcttttggcaacaccctcacagacacacccaggatcaatactttgtatccttcaatgcaatcaagttgacactcagtattaaccaacacaagtccaccctttgtcaacctgaacccatacacatctcctgagatcatacataatcttcaaatgaagacaataatgaggttgtaattatgcctaacataatacaactatcctttgtacaaccagaaatgcaccaatccccaacccaaaagctattacataaagttaacaatacttaaatgctgatgtgaagtcaataaatcttatgttacataataaaggagaaaggaaataaaattaagactttttttttttttttaagatggagtcttgctctgtcaccaggctggagtgcagtggtgcgatctctgctcactgcaacctctgcctcccgggttcaagcgattctcctgcctcagcctcccgaaagctgagattacaggcgtgcgccaccatgcccagctaatttttgtatttttagtagagacggggtttcaccatgttggccaggattgtctcgatctcctgacctcatgatctgcccgcctcagcctcccaaagtgctgggattagaggcatgaaccaccgtgcatggccaagacattttcttagtacaagtgtatacatgcacaaacatgtttttaacaaaagaaggaaacgctcatgacaattacagttctcgtttctgcagctggtcatgtggtcataactggtattgatgactaccttcttctactacccattctgtattccctttaccttcagcaagtatctcaacaggtcgtggtttttttcctgatggagagacctaaaccttcattcctgaagggtctggaccatttgtagtcctgcctggattgggctgttgtagtttcccattgaccttaatagcagggcatggtaatactgagtcaccctaatggatctcctgtattccatgcgtacatttctttaccttggttatggagtagtagactgatttcatctatagtctgaggcaatcacagcagccaacactgtagctcccttctttgcctgtttacttaaaggtagaaggaccccaaagtgtccaggtggcaatcttaacttccagtttaatgggatcgttgttgcaactcctggtggcagctttcctccctctggaactgaggtctctaggccagcagaatgtaatgttgcgggaacaggaagcaaaaattttgctagtggatcactaggggtgatggcgagtggtgccacttccacttccacctcttgattgctgaatccgtgaactctggctatgggaggaaacaataccatatattggatgctgattcagagcatacatggctttctggagaacttttccctagccctgcaaaatattgtcacgtagttggcattgtaattgtgacttcaaaagaccattcccctgttctatcaatgcagctgcttcaggatgatggcaaacatggtaagactagtgaattccatgagcatgaatccactgccgcacttctttagccataaggtgagtgcctttgtcagaggcaatgctgtgtggaatatcatgacagtggataaggcattctaggagtccacagatggtagtcttggcagaagcattgtgtgcaggagaggcaaacccatatccagagtaagtgtctattccagtgaggacaaacctctgccctttccatgatggaagaggtccaatataaccaacttgccactaggttgctggctgatcaccctgaggaatggtgccatatcgagggctcagtattggtctctgctgctggcaattgggcactcagcagtggctgtaaccaggtcagtcttggtgagtgaaagtccatgttgctgagtccatgtgtaacctccatccctgccactatggccactttgttcgtgggcctattggacgatgacaggggtggctggggaaaaaggctgagtggtgtccacagaaccggttatcctatccatttgattattaaactcctcctctgctgaggtcacccgttggtgagtactcacatgggaaacaaatatcttcacagtttttgaccactcagagaggtccatccacttacctcttctgcaaatttctttgttaccaattttccaatcacgcttctttcaagtccctgaccatccagccaaaccattggctatagctcctgaatcagcatataaacacacatctggccatttctccttccatgcaaagtgcacaaccaggtgcactgctcgaagttctgcccactgggaagattgcccttcaccactgtccttcagggatgtcctagaaaggggctctaatgctacagctgtccacttacgggtggtgccagcctgtcatgcagaaccatctgtgaaccaggccctagtcttctcttcctctgtcaactgatcatagggaactccccatgaggccatcggtgcaggcttggggagagaaggcagggtgacaggagtggagaccatgggcatttgagccacttcctcatgtaacttacttgtgccttcaggacctgcccaagcctgatcacgtatataccacttccatttgatgatggaatgctgctgtgcatgacccactttatggctagatgggtcagaaagcacccaggtcagaaagcacccagttcatgataggcagttcaggtcacatggtgacttcatgacccatagtcaaacgttcagtttctaccaaagcccagtaataggccaagagctctctctcaaaaggagactagttatctagttatctgcagaagatggcagggccttgctccaaaatcctggaggccttcactgtgattcacctatgagagcctgccaaaggctccaaacagcatccctagttgccactgacacctcaagcaccattggatctgtcgggtcatatggcccaagtggcaaagcagattgcacagcagcctggacctgttgcagagccttctcctgttctggaccccactcaaaattggcagcctttcgggtcacttgataaatgggctggagtaatacacccaaatgaggaatgtgttactttcaaaatccaaatagacccaccaggtgttgtacatctttcttggttttgggaggggccaaatgcagcaacttatccttcactttagaaagaatatcttgacaggccccacaccactggacccctagaaattttactgaggtagaaagtccctgaattttagtaagatttatttctcatcctctggcatggaaatgtctcaccaacaagtccagtgcgtttgctacttctggctcactggatccaatgagcacaatataatcaatgtaatggcccagcgcgatatcttgtagaagcgaaaagtgatcaaagtctctctgaataagattatgacataaagctggagagttgatatagccctaaggtgggacagtaaagatatattgctggccttgccagctgaaggcaaatcacttctgttggaccttatggacaggaatggagaaaaagggatttaccaagtcaatggctgcatacaaggtaccaggagatgtgttaatctgcttaactaatgaaaccatatctggtacagcagctgcaattggggtcaccacttggtcaagcttacaataatccactgtcattctccaagatccatctgtcttctgcacaggccaaatggaagagttgaatggggatgtggtgggaatcaccacacctgtgtctttcaagtccctgatggtggtactaatctctgcaatctctccagggatgcaatattgcttttgatttactatttttctaggtaaaggcaactctaatggtttccatttggcctttcccaccatgtagccttccctcaccctaccagtcagggagccaatgtgggagttctgccagctgcaattatgcattctggcactggggaaatgaccacaggatgagtctggggaccaactggacccactgtaagctggacctgagctaaaactccattaattacctgacctccgtaagcccctactttaactggaggaacacagtgacattttgggtcccctggaatcaacatcagctcagagccagtgtccagtagtccccaaaatgtctaatcatttccctttccccactgcacagttaccctggtaaaaggctggaggtctccttggggaaggatgggagaaagattcactgcataaattgttggcaatgtagtggagtccttcctcaagggcacccagcctccccttcactcaaggggttctggatctgtaaactgactcaagtatggaaattgattgaaaggctgtgattctctgttttataattcaaattagtcttctgtccattcgacctagaagttttctgtttgtaaaatttaagtaggcatgcagtaggcttcctatcaatttaacttctgggaacactgtgattaattagccaatgccagagctctacacaagtcagactattctgattgctgctttgcctctgctgaccattacagtagctacacccaccttgcctttcacagttgagtgctgccacttggctcctcccacctcgggattcaattattcccattgtatttaaattttgtagttgagtgactgcggttcccaccattagatctgacatacagagaagaacaattacagggctcttcaaagatgcaggtgctgccctcacaaatttattttgcaagagattggtgaagggtatatcttctgtctgaaccctcccagctgggatgagtaggtctaaagtgactaatccactccaccatcccaatctccctaagcctttcgatcccttcctctacattaaaccaagggagatcaggcatttccagctcgctcacaatgggccatcatttaatccatatttcagctaaccaaacaaataaactattataatcttttttttaactccctgagctgcaacattaaatgcaatgcagagtccctacttagtgggcccaaatcaataaattcagcctgatccaattctatgttccttccaccattatcccatacccctaatatccattcccatgcctgttctccagatttgtgtttatatgaattaaagaactcaaacagttcttttcaagtgtagtgcacctcctcatgggtcacattctcaacctcacctctagggtccactggtagcttagtctcgttatatgtctggaagcaaacagaggtgttgggggtggcttctgaggagaatcaacattatcttgtctggcaattgcctcaggggaggccatcgctgttgcctcaagcagcacagggtttgtctcctcagacagaggtggaaaggctgatggcagcatgggtcaggaaggggatgttgccactactggggatggggaagctgtttcttctggcaaaaaaggttcatcagaatttacaaattcagtatccccagctttatcagggtcctcccacacatccccattccaagttgcagggtcccattcttttccaatcaatgccctcactttaacagtagacacctggtgaggctgtgcatgcatttttcattgcaggtcagccactcgcacgataagagcttatatctgtttttccacaatttcagctttttctctacaggagataagactcactcagggcaatcttagcagatttgaggctcagtatctgcttttgaagccaggagacagaatcccttcattcatcattttctttcatcactttgtccactgaacttaggagcaaccaaccagcttcattatgttccttggttctccacatatggtcaaaagtattatgtatatggtcacctcactctgcctgtcatgagcagtgaatcaggagtgtcaaatggatttattttgtataactctctaaacagttgccgctaagcactatcagtgttctctatactattagtagtagagtccctagcatttttgggtctaatcatattaagcagccaactccagaaaccccaaaaccaatgaaagaactccatccttaatattctgttcctctagaaccactgctgctaccaaaatctgtattagtcagggttattttacagggacagaactaataggatatatctatatctatatctatatctatatctatatctatatctatatctatatctatagctatatctatctatacaaaggggagtttattaagtattagcttacatgatcacaaggtcccacaataggctgcctgcaagctgaggatcaaggtaagccagtatgagtcccaaaactgaagaacttggagtctgatgttcaaggacaggaagcatccagcatgggagaaagatgtaggctgggaggctaggcctgtctctccttttcacatttttctgcctgctttatatttgctggcagctgattagattgtggccaccagattaagggtggatctgcctttcccagcccactgactcaactgttaatctcttttggcaacaccctcacagacacacccaggatcaatagtttgtatccatcaatccaattaagttgacactcagtattaactatcacagactgagaagaaaccacttgagggagcatagggaacaacaagaaaagggcacaaagagctgggattagttcttgttccttgcagcaaaagtggaaaacctcgtaattcaagagacatcagatagagtattcaaaaagtcattacctcagaagaggggcaaaataagccctagataaattacttctttctaatactacctcacaaaacttaatagacagactcagacagataaagtcatttcaggtaacataactatgaccaagaccaacattaaggaatactaatagaaaaacaaaaatatctatcacccaccataaatgataaaatcatgatgtctggaatctaataaaaaatgagtaggcatgcagggaagcaggaaatatgacccataatgaagagaaaaaaaccaatcaatagtaacaaattccaaattgacacagataatagaattaatagatgaggacattatgaaagttatagtaactatatctcatatgctcatgaaaattgaggaaagattgagcatgttaaatagagatacggaagatatggaaaaaaaccagatcatcaaatttctttagataatgaatgcattgtataaactaacagcagtttaaatatgacagagtaaaaaaaaaaaatcagtgaactgtaaggcatagcaatagaactatgaaaaataaaacacagaaagaaaaagggccccaaataatgaacaggacattaatgatctgtgggacaacttcaggcagcccaagcacatgtggaattagagtcaccaaaggagatgggttgaaggaataattatatgaagaaatgagcgaaatgtttccaacccaagaaagtcaataggcctcaagtttgtcaagaaaattatatcaaggatataatattaaaatgacttaaaattattaataaagaaaacttaaaagaaattagagaaaaagagtttgtacatggcacaaagttaagcaacttttttaaagtattggaaaaataacctctcaccctagaattctgtatcaatatcttccttactactcaagaaaagggatctccatcaagtactactgacacttgaacaacacagatttgaactgcgtgggtccacttatctgtagagtttcttccacctctaccacctctgagatgtcaagaccaacccctcctcttcctcttcctcctactcagcctaatcaacatgaagatgatgaggatgaagacctttataatgatggatttccacttaatatatagtatatatattgtctcttccttatgactttcttactaacattttcttttgtctggcttactttatcagtatatagtacatataacatacaaaactgtgttaatcaactgtttgtgttatcaataaggcttctggacaacagtagctattagtagttgtgttctgggggagtcaaaagttatatgaggattttcaacaggcgagggttcagtgcccttaacccagtgttgtttaagggtcacctgtagtttggaatcaattaggaaagcatggagtcctcccttttctttccttccaagctcttcccttcctttcccttcatttttttttttttttataaatacaaggttgggaaaaagatttatcttatgcatatctattaactggtagtcctgaagtctggttgtaaaggaagatatttactcctaggaatcatagcggtgcttcaactcaaaccactggaaattattctcagacattattatctccctaagattcttttctgtgatgtaaattactgtgcttcaccttcctatggctgaacccaaatagtgtttcacaagaagctactaatagggccagtgtggacttaaaaccacttaggactcatagaagaagctcaagtggttgggaatgggaagatgaaaaagatacagaaaggagacaggctttgttttctctaacattttgtctatagagctgtagctaatgagaatcataagatgcatcttagcctcaatgttctgagaaatgttgatgccagagattgtatttcaacagttaagatgctttaaggaatacaacttttgttgttatttactttggattaatgagctaatgttaatttttatagcttttctaattccagtagagtataagggtaattccttacaaaaaaagacaaaaaacaaactaacaaaaaatcctgtatcaatagggtaagttggccaggcgtggtggcacacgcttgtaatctcagcactttgagaggccgaggcaggcggattgtttgaggccaggagttcgagaccagcctggccaatgtggcaaaatgccgtctcccctaaaaatacaaaaaacaagcaaaaaacaaatgaacaaacaaaaaaaacaaaaaaattagccgggtgtggtggtgcacacctgtagtcccagctacctgagaggctgagacaggagaattgcttgaacccaggaggcagaagttgcagcgagccgagatcgcaccacggcactccagcctgggtgacagggcaagactgcgtctcaaaaaaaaaaaaaaaaaaaaaaataggagtacgtttacattttaggttcctaagcaaatttttaaaagaggctaacttttaagtccaattccccaggaacatctcaaaagcttctcttttttaaaagactccatccaccccaactctgaacagtgatacaggagctatggttaaattagagtttatctaaattaaaaagacctaattcattttataagacaacttaacattcattatatttatctatagttattgagtaatttgggatcataataaataatatctaatacgaataacataaatgtcataaaggtgctacttactggagttctgataaaatgtatattttccaatttaataagataaggcatgagagacatcaggatttcccatgttagaagttgtgaattcattttttaattatgagcatctaatcttagatctaacccaatcttagattttatgtatccgtgcacagaagaaattcacataaaagtatattgaaaaaatttgaaagacatttctttttttctttttttttgagacagagtctcactctgttgcttaggctagagtacagtggtgctatctcaactcactgcaacctccacctcctgagttcaagcgattctcctgcctcagactctctggagtagctgcaattataggtatgtgctaccacgcccggctaatttatggatttttagtagagatggggttttgccacgttggccaggcaggtcttgaactcgtggcctcaagtgttccgcccaccttggcctcccaaagtgctgggattacaggcatgaacgaccactcctggctttcaactacattttttacaggtattagtacaaataaagcttatttgggcaaataacttaccacatacttattagtcacgaaaatatctttggtaagttgtgatttctttaattatttttggtgttttgttatgtgttaaggtcatcctgttgaatggagaagagaggtgggagaatggttagtgtgtgtgtgtacttatggtcaaataaaaaggtgcacattagcttacttacatatttatacaaaaatatttattagataccaactctgtgccaaacacagatgctgcaccattaaatggttagttggttagggttagcaattcatgtactggtcctgaaacattcagagttgtctcatttacttgaagaagttagaaaataccaattttggaatagaagaatctcatgctgacagtgatagtagagttagacaatacacatgaaaagttttaagggcatgtcaaaaacttaagagaataatatttttcttttaaaattgccatactccccaaacacatggaggaaagtctgtaagattggatggcaacttggcacatttgaatgaattgatcagaaatggagaaaaattcctcaataagtttcccaaagtagaagatttgtgcacaggaatttgaagaaattaagtgacactgcttaagaacagaaggtaatgaaaataaatacatccccttgcaccaattatgaaaattagaaaaaaagaggtcacatggagtgtcaagttgatgagtttatttggaaagcaggatttgtgctgggaagtgataagaattagttagttggaggtggatgggtaaagtgttctaaatgttgggcttaatttcgatttaataaggaggccaattcagagacttaaagaaatttagagcaggataatcccttagttcttcatcttcccttcagtcataagaaaactaattttactcagattacacagccttgagtggcattgccagttgggatcagaacccaacattttctgttttctgtgttcttttcatatgccctgctactctgcaaaacaatgccctattgatcaggagtggggagagacacatgactacaatggtaatgaaggaatactttgttaggaaatttctattttaaatactgaaaagaaatcagtctctttcccatccttctgcttcttactttatagactctgatcttctaaaggacagttgtgtccccaactgtttcattgtccagcttctcccttggtgaatgtgggtctgtagcaccctttctgctatacaaaaggagcagggtcactaactagtagcacagtctgtgccccttgtgccctaggccactctgtcacccaagcttggttgcaggacaacatacttagtggcctttcaaagatggatgctcctgtaatctgttccaaacctcggcttagttatgctgctgcccctgccacaatttggaattctctcacatcatcactctgcaaataatggatggaagctttggtggaacttatagtttctggtctttgatggaatttatggttcctgtcctggagcagaaagaagaaaaagccagagagtgttatgctttttaaagagagttccatttgtctctggcagctacttgaatattcctcagagtgtctgtcagctggaggaaaagttagcactgatttcgacatttccttcttccctctctaaggatttaaaaaattttcctttacaaggtacggcttgagaaactagcccagcctctcccacaggtgaatcttatatttcatatataagcccttctgaatcttatatttttaggaaagggtgagatatggtcatcctgtagactctcccttaataccaaggaaccacatatgtcctctggaatggagagtgggcgaatcctcccctcccctccaagagggaagccaacttcctcagttctttgtaaccacacttctcactgtcccaggtacatgacttctcagtggtttttgtccccaaggcagatagctactctcaggggtgtaaagactctgggcagctctaatcttctgattttcatatgtattaaatatcacagtttgaaagctttagaaacattgataaggttcatattattgtagttatctttgccaaatagacctgaagagctatcatgccagtgtcatccagccttgctattcctctggcctccatagacttggctacagtggactgaatggtggtctctaaaaagatatgtccatgacctaacctctggtacctgtgaatttgactttacttggaaaaaggatcttcgaagatgcaattaaagtaaggatctccaggggagatcatcctggatgaactgggtggatgcaaaatccaatgacaaatgtccttataagaagaggggaataccaatgccaacagtagagaagaaacatagggaagatgtgaaaatggatgcagagattggagttatgtagctataagctaaagacaatcaaggattgcctgtggccattaaaagctagaagagggctgggcatggtggcccacgcctgtaatcccagcactttgggaggctgaggcaggcggatcacctgaggtcaggagtccaagacgagcctggctaacatggtgaaaccccgtctctgcaaaaatgcaaaaattagcagggtgtggtggcatgtgcctgtaatccgtgctacttgggaggctgaggcaggagaatcgctcgaacccaggaggcagaggttgcagtgagcagagatcgcgccattgcactccagcctgggtgacagagtgagactctgtctcaaaaaagaaaaaaaaagctagaagagacaaaagagggttctcccctgagtctttacaggaagtgataccctgccaacactttgacttcagacttctggcttccagaattgtgagagaataaattccttctggtgtaggtcaccaaatttgtggtaatttttaatggcaaccctaaaaaaactaacccaccagcatataaaaacatggagtatgatgatggtaactactgtccacttcttctgcccaggtgtcagccagcctggccctaaagagatgtgaaaactagatctcacttgaaaccttgcagccacatccttctccctgcatctcttggtcttccctcaaaatacaaacttctgcatttagtctttcccaaactttaatccctagaaggtaaatactgattcttgcttcacccatgcaagaatttctactttcttccacacagcattggttatataatttgctgggctcaatgaaagatgaaaatgcaagtccccttggtaaaaaaaaaaataataataataaataaataaataaaataaaataaaataaaatatttcaatgcagggacaggggagcattaaacattgcacagggccttcttaaaagtagatcctgagcaaggcatgtggcttatgcctgaaatccaaacactgtggaaggccaagacgggtggatcgcttgagcccaggagttcgaggccagcctggccaacatagcaaaaccccgtctctacaaaaaaacaaaacaaaacaaaacaaaacaaaaaaacaaaacaaaaaaacccacaaaagttagccaggtgtggtgatgtgtgcccgtagtctcagctactctggaggctaaggtgggaagattgcttgagcctggggggccaagtctggagtgagccgagattgggccactgcactccagcctgggtgagagagtcagactctgtctcaaaaacaaacaacacgtagatccctgctcaactgaacaggtcatagacccacgaagccagccctacctcccacctcttaactactctgaccttggagaatcctcatttaatattgaaaaataccaccaacctcataaactatttacacaatgctttctccattttctggccttaagtggaaataagctttcttctaagaattatttcccctagatgtccctttgatatagactgttcattgtttcacattctagggtcacaggggcagtgttgggatccttgtaactccccagtattacttctgaagtcttaattgtctcttttaccagtccttgatccacttacgtttttcctccctggatatgcaccttctgccccaactttgcatagtcatcctctcagttctggatcagtccactacattcacggaagtgtttgttatcaaactcactccttttttcattctggtattactgttggtggcttcaatgtccatatagtttcttcaataccttagtccctaatgtcttgatcttcgttctacgtcagccaaccccacccttagctcttccataaactgtctatctttgtacttctaaaacttcaaagaaaacgatcccatttcctgactacaacttatctctctcatttgatgtggatttgtagttcttggactcttccttcttctcccctctttgtcctcacttattttcctatttattcttgttaaccttaaaaccttgtcttaaaaatagtatccaagcttgctccttgtcttttcatcacatcacttggcacaatcccaaagttggattaaactttctgcatttaaaggcatatatttgacacaaattcacaattcacatgattgtgtggaattactgctaccaccaattcttggactcaaaaactcctccttgcacttatggtcaggtcgtgtctaacatttgcaaaagcagctactgcaaacctttccgcatcttctccttactttcctagtagaaatgagaggccatcaaaaatcttaaatctaaatagacaaaagcattctataaatagtgttcttataagtcattatttggtcttaagtgtggaaacaaagttaatacttattcatttcaaaacggcctgtagagtacctactttgtgaaggtactattctaggtgttgaggatatggccttcatgggccatacattccagtggttctgatgatttcatatgtaggttaaaagcttagcagtgaggtctagtggttttctcacattgatcccaaaatacagattttacaaagcaaaattttcaagtataggaaatacacttgcaggatcataaaaatccaatcatgataccataattcataagttcaaacattttagtatcactctctgtcatagtacctctaaaataaataaaccttagaataatttgccctagataataaaaatatatgttattatataatataataataacaggccttagcagtatgccagataataagttttaaagttacactaatgatataaataactctcagtctctttgattaatgcttgtgtaaccacacaagtaactatatttttattaggcgggtgcagaagctactgcagtttttgccagtacttttttgcaattacttttgcactaacctaatacaaaacaaaatgtgcctacatcacaattcagaaaaatcacagctttattagcagagtataatttaaggaagtcaatcaatcctgaaggcagaaagacctaagttcaaaactgatttggaatcttctcagctatttagccttgttcaaagtatctaaccttgctgaacctcagtttactatctgaaaatagagaaaattattactatattgtggaggtatgaatattgaataatttaaagaacttgattgtactaccattagcacacactgaataaaatattagtctgattatattttcgtatttccatatttaggcttttgcctaaaaagggaatttggaagtggtcattggcaggtgtcataggctttgggtggcaagtcagagcatagtatgaatgagcaaattagtaaagactagagataagagaagactttgagtactaattaagagtttcaggagaccagaggagattttaagacttcagtgagaaaccactttctcaggaagcagataaattaattttatcagcagtatcgtcgtccatgtaatatggcttttaaaaagcacagtgagaccttagtagtaacgactttatttttcttagtgagaacctgaaagtgaaacttgatatacattattttctgcttttattgcacaaaaagttgtttccattgcatattgcttcctaatctgttaaaataatctgttaacaaactcgaagacccagattcggggcgtagataagcctgtgtaccttcctaccttctccaaacagccaacattagatcaaagggcaaccttaatgacacctggagcacaaaccctgctcagggcgcgtacaaccggagggacagaaaacacgatgcgacgtcggaaagcaggaagggaattgaaattcccgcagtcacgtcacagaaatcttagcagaacctcatcatcgcccaagggaactgggagtggcgggcggggaggacgcgggttgtgtgacgatcaccgataattagttggtggttaacgcacaagtaggataaaagagctcgccccaggctgccagcagaaaaaagctaccgtggcacgtgccccggggagtgatgcggtggcccggtttgcacggagagcgggacaccgcctggggagccgcgctcgtagcctgggggcgggacgcggcggccgctccctccgcccccgagtagctgccaccgcctggctgcgccccagcccagtagctcagacgcggccgcatcccggtggactgtagaggcggcagcgagctagagcccgagtcgcagctccgggccgcagagcgctgggcgagcgcgagcgccagggcaccggcagggcaggcagctgcgcgcggctggtacgtacctggtggagcgggcgcgtgagtgggtgtccctatgcgaggagggaggagtgggacttgggaagtcgggggagactgacccagggaagatgtggtaagtgcaactttcctattttctgccctgctggcacaaatatggggggagttcgaagcagatgcctctttcgcttgggcgacccgatccatcgtttaactcacaagtcagggtacttagagagtgaaaaggacgctcacgccaacaggcgtgacgtgggaggtctgtcacctgccttttgcccactctgccctgcaggtggccattgatgacctcctgtcacaagtcgctgagtccttcggctctcgcgccagcaatgccaagtctttcccctgggcggtgcttaccaagccccgggtagtcacgagcggccgcggggttagcagagacccgagtactaacccgctcggccagcgtccggctgtgtggctttagccaagtcacctcacctcactggcctccgtccattctttggataaaatatggaggtgggtagaccgagtaaactcaagggtcgcccgtagctattggattttccctgctcctaggaccccggcaggccgcagggagggacacgagtgccaggtggtcgcgggctgagggagcggagggcctgtgttccggttggtgctgatgctagccccttggggaaattcctgaaggtgcatttcggagccaaatgaccctgccttgcagcaggtcccttccaagggagctgagagggccaggtcagaccggtcttcgtagagctccccggggaacgcagccaacggaactcgggtcctttagaaaagtgcatgcgtgaactaggcatgtgggaagcactaaaacaaacaacaaacaaacaacaaaacaccctgcaggtggtagtgttattagctggagtctgtgcaggactggaaagtggagatttgaggcgaatgaccacttaaacgttcatctagaaaaaaaattttaaaaaaactcttttatcagtggtttgcatactgaaaggtattgaattagaaatattgcgagtattgcatttctcttcgtgtacagatagatttcaaaattcatctgtccactttatctcttcacaagatgccttccttcttactgacattgccacacattcaaaaaaaatcctcctgggattttatatttagaaagctcagcatttggattattaaaatgagaactgatgaccataatgctcacggaaaatggggtaggttatggatcaagtttggttaaatcagcagtttataaaccttgtttcctgttagtgtgccgggtgctggtcaatgcccccctagtgacactatctcaagagatcatttgctaaaaaggtgttttggaagttcaaaagattcgattttgaaggaaagtatagctttggaaaggaaatcttttggaaaacgtttttagtaatggacttctcaatcttatctttaccacaactttcttcaataaaatatcaaagactaatggaccacattatgcagaatattttaaaatgtgtcaaatttcatttttgttaaagagtttttcctcctttttagtcgattgcaaacatattgtttagatcaatgatagatcaatttaattttcctcacagttcttacaattatttaaattcttacgcagtttgcattacagcatttttttacaactttattgagatataatttatatattataaagttcaccctttaagggtgaataatatttaaaaattatatttcagtgagttttagaaaatttgttaattttctaaaagttgtaaaaccattaccatatctggttttagaacattccaaaattgtaaaaccattaccatatctggttttagaacagtttactcacttggtaagattccttatgtccattatgtctttgttcccactcccattcccaggcaaccattaatctactttcagtctatagatttgccttttctgaacattttatataaatggaatgatatactatatggtcttttgcttatggcttctcttacttagcataatgtttttggggttcagctatgttgtggcatgtatcagtatttcatttcttcttattgctgaatagttttccattgtatggatataccacattttgtcaatttactagtggatggatatttgggttgtttccaatatgggaatattatgaatcatgctgctgagaacatttgcattcaagtgtttgtgagtacccgttttcatttctcttgggtagatgcttaacagtgaaattggtaggttgtatgacaaacttgtgtctaacttttaaggaacactatagagtaatttttgtagaagttatatatataaaaatttaaaaaattctggaaaaataaatgtttcttactggatcatatatgatgttatatgtatatagagagaggcttgggagaggaaccattgcttctcttcaaatttagagctgaggtacagcaaacacttttgaaaaaaatgtcgcaatatttctcagaaacgagatatttcttgcctaatgttttttaatgctaaatgagcatgaatcaggcttaatcaagactaaattttcattaatgtcaattgaaaatgagaaagcatgcagtttgaaaattgtattttaagtgttgagacttagccagctctgaatggctggacaataaattcggtggttttccatttcttcaatgcaaaattttaattgagttagaaaaaacaaaattattctttcctcaacatcaaaaataaactatacgtcttgtgaactatatgtcttgtgataagcattgttaatcatgattccatataattattttaaataataattaagcatattctattagtagatttagggatctaaggcccaagagtaagtgatttccatatacaaaaatcacatattagaccagggctctggttttcctgttttaaaacttcccccattagtacatgttcctctaaatcctgttagtttcagacattttcatatgttatatgtactttaaaaaagtcattaccaggtagtgacattacatggaaataatctaggttaagcacttgaacatccccataaaatcaaagacagctactattttttatttttattagaagtacaactggttttggccctgcgtggtggctcatgcctgtaatcccagcactttgggaggctgaggtgggcggatcacaaggtcaagaggtagagaccatcctagccaacatggtgaaaccccgtctctctaaaaatacaaaaattagctgggtgtggtggtgcacacctgtagtcccagctatttgggaggccgaggtaggagtatcgcttgaacccaggaggcagaggttgcagtgagctgagatggcaccactgcactccagcctggtgacagagtgagactccatcaaaaaaaaaaaaaaaaaaaaagaattacagttgattttgagaaatcaaatggatatgctactttttactgaactgaggtacactttttattctagcaagtggcaaatagcagtattatgtgcccagagcagagtggatttgtgttcttcagtcactcctagttgtaaaaatgtgacattgcccaagagttgggtgcttggttggagaagagagttcagagatgtttagataaaaataaaacaatctagatttgcataatttcctgaacgggaagaggtattctcacctagaatcctggatctgttagaagtaggatttctcagattggaaagagggccaaggaaatggagattctttaagacaatgtggtctgtagccaagatagttttaatgtaattgaagaagcagcaacagaagcatctacagacaatatgaatggagctggattccttcctgtacctcccagactctcccttcctgcagtctctgctttcttctaagcactcttattggctatgctgttgaaagtattcttatccccgtgggggtgtgggagtaagcatccccatgggggtgtgggagtaagtaaactgtaggctttctttttttttggataaagtaaagggagaactgaagtccagtgtgatagcttcaggaataaaaccatggaagacaggaaataattaggtagtcttctcaagcatgcttatattttaatggtcacaaaataatttatatctagattaaattttatggattgagctaatacatctcagaagaagaaaacaccattcttaaaattcttaaaatcataaaatcttaaaatcagtgtgtgtgtatgtgtatgtgcatgtgtgtgtaaagagggcttacaactcatgcaattacattagtgtattacattagtttattttatattttaaaatgaaaataaatacctctaccatggagcttctggagccaggtataatattaaattttaaaatgctgaaataagccctacttttctcacttttcccaaaaaggccttgaaatctaatgaaaagccagattataggtatggtggattttgttacactccaagggtttgcaaaaagtctatcaagccaaaatttataaacgccaggacttcacagaaaccactcttcttttcagttccatcatccttgaagaagggtgtctatgataattctgtgtattgtagtgaagtagtagaactttttgcagtagtgaaaagaaaaaaaaaatttttaaatatgtctttctaacatgccatgaagctgtgcatatgtatatactgttgtaatcctggggaggtttcatctgaaggctactggaaggactgctctagtaggccaagcaagagatgctgaatgagtcagggcagcagaattagggatgaggaaaagtattcagattctagaaatattaggagatgaaaataattgagtttgatggtagttgggatatgaagttaagaagacatgagaatgaagagtgcctctcagattcttggcttgaagtgagagctggcacaatttacaaacatgcaggtttaagaatggggcgacttcatgggtgtactgagttggataatgtctccccaaaattcacgtccttcctagaatctcaggatatgaccttatttggaaataggatcactacatatgcaattagctaggatgaggtcatactagagtaaggtgggctcttaacccaatatgactggtttccttataagaagaggcaagagacacaaagagaaagacacatagagggtagacaacatgacaatgctgggggagattgaagttatgaaactgtaaaccaagggatgccaaggtttgctggcaaccactagaagctaagagagaggcataaaacagatttcccctctgattccacaaaaatgaaccaaccctactgacagttgattggattgctgccattctgaactgtgtgaaaataaatttctgttgtgttaagtcactcagtttgtggtaatttgttacagcagctctatcaaactaatacagtgggtgtgagtaaaagatacattggggtgaagatatccaagaagctgttgtataacaagctcagaagatgcagattgagttgacattggcatgcagtaggtaaatataatgatgagatctcctatgggaagcacatggaatcagaaggaaaatgggagaaaaatgaatcctgggaaatgagttccagtcagagcccaagaggagaagctggaaagggcattgtcatagcgacaaaggtatgtagagcttcaaaatgtgtggcatgatcaacaagtcatagacataagaggacataataggagaagggttgaagggacttttgttttgacaagtagaaagcaagagtaatggctttatgattggaaggttgaagccagattgtgctgcgtgagaaggaaatggaaagtaaggagataggatcagctagtgtccagtagtcctcccaggattataggtgaaagatggaggagacggttcggtatgcagggaatcacgcgacacagtgtccaattaatttttgtttaatatttaaaggaaagcctttgtcctatctttaggagtcattagtgtgggagaggctgttaagtatagaaaagacaatttatggagctgctttccaataaaggggattgggttaaggacgaaagtggaggccttgaacatacaatgttttcaatctgtagtagaagcttgagatgtttttaagggtgagtagtttttttttttctttctatggaaataactgttatgctaagagaaaggaaactactgtttattgagcaatctgccagacccctagggttggagtctggtggattgatcaataaatagtaatttgtagcacattttcactaatttcgtttattctccaatctgtgaagtcagtgttactgctctattttttaagacgagtaggcaaagagagtatctattcaaagtcatttaatagaaagtggcagagctgagattaaaagccaagtttgattgatgcttatttcttaaatctacagcctttctacccttctaatttgagctcagtaaaaatgcccagctaactcacttatattggaccttcttagccagtggctgagcacacactcaggtctcattctcaatatcccttgtaaatatggctgcaaagaggcaacaggttaatgggtattgcatctaccgtatgcactacctaatgtggtcaaagttctacacctctgaaatcaaacagtcatttcaggtttttcatttatttgtcccttatggattcaaccatgtggaaatacggggttgaggggagccatttttatttatttccctcagggagtggtggagaaagtttttaggggaagtgaggaatacttttctggcacggtagatctgggtcagctccctgagatgcttgtggacttttgccaaagaatattaagcttcaagtaaaacccagcatagtttgtttcaactctgagaaattcatattttgggttctaggtttgaatgctttgaaaggaaaaataaacctttcagtattcagtgaaacactggaggaaacaaaacattgtttttactcatagatatttatttttaccaactctttaaaaaagtattttaatttatcccaacttgatgaaaacttttcatattttctttcaataatattattggtcttaattgtcagttgatttgttttctttttgtaggtttttgttttaatatgactcatctgaaatacgaattaagtttgatgacaacagtttaggttatgtctaagtatatctagaattattttacataaggactgttaaaaagatttactttattaagtacatcaagatgttttttattttaattctcacatgcatccataattgttttaatattgggtatcttccagtttttgtacatttgtaaggatgttttttacattaatgtaacaatggtgtacagtttgtatcctacatttcttcctcttaaaattactattgccagtgtaaaaatgagtagaaacagaaaattaaagaaaataacatttcttaaaagaatgtatagtatcctatgaaacagtttttggttagataaaatttcagatcataaggataggaaacactttctagtttgctgaaaggctacattctaatttcactgcaccctgtggtaatcattgatttaactcagaaatgagaaaacaaaataaaagagaaacatacccaaacgattaaaattcattactttagctattagcagtatttgaaagtagaattcaacttttcaagggcagtatgtgcttactgttataaattcttcaccaagaatcacagacatgaaaataccctcaaacatctttttctttctttcagtctcatctctttgtcaaccctttatcattacataataatgaattattccacatgttactttctgggcaagtaatgttttccacttaaaatactaccaagtcctaacctttaacattttttaataatgttttagagataatatacgttgcaatgaaaatcagaaatttcagaatagttttaagaaaaaaaaggtctatttatatttgatttgtccactaactagaagtaatcactataaaattattctttgcatacacataactttttaaaagacaaaaaattatcatatcatattccctgtttcccacttaataaatcatcttagtataaattacagttttttaatggctccattaactaattttctggtgacgctacagaaagttaccaaattcagttttataaacaatagcatagtagataactctgttcataattttgatacatcatatacacctatttgattaattcctttgaataaatttctagacatagaattgctgcatcagaggatgttaatttttaaagagttttgatatattttacaaaatatcttcagaaagcctgtgcagtttacattcaaaataatacttttactaacatactaatacagtttcaaaaatttgaaatttagaaatcagtgggaaaatatagctacatttgtatttctttgattggtagtgaggcagaatatttttagttatttttatgaattgttattttatattctttgcctgttttttcaatctgtttgcaagagctttttattgataaatatatcaaccttttgtatgtctattttacaaattttaaatgttttctttttaccattaatgatttagggtgcactgctttgtaggatacttaattttttaaggatgtcaaagttatcaatctattctcacgtagtttgtgaagtttaagatggcctttcccacttgtaaaagtattcacctacatttgcttttagtactttttacatcttttgtttctatttaaaattttaatccattggcagttattttagtaagaaataaagtggggatcttaccttattttattattatttaatggctagccttttttttttatagctatttgtcctataatggattccctccccattgatttgaatagcatcctgtgccttctcacccccgcacctgccttggaacttacctttctcatagctgtcccactgttagaatgcgttagaatgcagacatgactgcaggctctttgactgctcccccttcatccacatctgccactcacaacctgagccctagaaggaaaaaaatttctataacccttgtcatagcatccagctttcctaaattaccacattaccagttttggaacatataattttgttggtcctgaaaaacagctaattttcaaatgcttcaaagtctctgattttatcattcacctgctcattttttctctttgtgttgaaactttgttatatgttttgctacctcccccttgacccaatgtctcctttgtattcttccttcaaaaccattccatcatgctacctggaacaactgttcaataataataaattaatctatattattaacttccaccttttcccttagccctgaagcttgactctcccctgggtatcttacttctccttaagcccttcctattggagactgtttattattttcaattttataatctcagagtagtagaggggggcacattcccttcatgcccccatatgccacctgtacaatatttttccaccctcttatactcacttccgctcctttgagcactctggctataccatcctctaccgtttctcatttctatcatcaatgctgagggtttagcacctgaacaaacccctcctgttctgaacactctagtaattggtgtacagtcatcttctcccatccttcttctgtcctaaatctggtgccttcctatgtacatccaatatcgtgacctctcacttaccatgtggtcgtgtgtgtttttttgaattcccaaatgtattcagaagagaacctagttaaagaagcacagactcagaagtatatagagccgaaaagctcattatagactaagaattctctcttggtttcttaacacagataggctaataattcagctttccattgatcagaatttgtgttgcttggtttaacttagacaatcgtttactgctagtatcaaaatatttgagaatattgttgcataagcatctgtgtagaatcaagaagttccacacaaggcatgaaagtggttatacatgtctagctcctgaggcggtgaggtaagaggttgagtggctttgtgacactatgcctggctgctgcattcatggatttttgtgccttgtttgctcgtgttcctatttaattttttaattagtatgttgagggaggcagatgttgagtaaatgctgttttgtaaatttttaattaggatttttaaaaattgaaatacctttttttgatttttgtttagctctaaatgttttgttttatattattttccctattttagttgcagcaaagatttctgcataaactacttcaagatttgcttatctgaatgaaaagttatcttccctgagaccagatccagaccaccttttgatgatttacttacctgaccatgtcgttcccttgagtttcttgttattatgattataataaagggagtacaagcaatctggtcattttaacctactaccagatggattagatcactgcgggatattggcttatttaccctacaatgactcatcacagtttaggaggaagaagaccagcttagaggtcaggagatttacttttgtagtttttggttaattactttactacctgtctctgatattataggttaatggcttctggggggattaatgagattagaaacagagagatgcccaatccttatttattttacaattttgcctaggagtaccgttccctaatcttaataaattatagtataaatacctccttgatgctaaggaatatgccaggtctgaggagatcaggttgaactgaacaaggttctagcccttcaagagcacaggattagtgttggataggtaaataactgcaaacacgatgtgatgaaagccaccataggagtatgaatcaattacagatgtgtccagaggtggttataagtaatctaatatcaggaatggtttctctgtagaggtgatgctattgttagatcttgaaagataaccactagtttgccacataaaggggaaggtgttctaggaagagcaaagagactcaaagtgcagcatatgtttagggaactagagttaattcaacataatagaatgtggacactaagggacagtgacaggagatgtagctggaaatttgataggaaatagatttagaagtgctttgcctattatgttaaatagattggacttgattgaacgtttcaaattacaggaaaaatggaatcttatttgtacagtggtgtactggctgaaagcccatgtccctcagagcacatgtctcttcctccattacagagaagtaaaggatattagaggaaatatggggagggctggactcaagttctgagtgggtaaatttttagatggattgactcggtggttgccttctaagaagtaagtcacatatggattaaagaagcatgactaatttagatttgttgaatttgagttagggtgtgtggaactaaggagaagtcaagactaaagatataaagtgtgggtttaactgtggataattgaaggcccttcctagaaattgctgtacttaaacacgagttatgtgttaaaatattttaggaataagtttgccataagaatcatgtgatttaactcttaaattatgtttttccccatttttttgtgttagcacaaactcggtaaatagcaaaattctataaaattatggaaactttcaaagtcataatttaaaaggaacagccttcttcattttttttttgtaaatacttagactatttttgccaaagattttagttctgatgctttagtttttctgacagctactccaaagattcaaggatagagtttaaatgaaggatacattcaagggtatcctttaggtaggaactagctctgctctgatttttatttagctatcattggagaacattccgaaaagtgtgtgtatagattatgtaaccagtcacttagggcccctgaccccttgttaacctggccctcttgagagacagtgagctgggggtgcactgggaacagctaggtcagacgcagccctgttgcttagcagtccccatggatcagtcataaggggttgttgctcagcaaccaatgctctagtggtgcttcatcccccatggcattttgcagtagtgggggctcacccctaccggagaagtagtacagtctggcagggtgccaaacatccccacaggcatgagggttcttagtaagtatctgaccttagaatcagagaagataacttatgttctctgaacgtgcaagtgatttatggaattattgatgtagatttaattaaacatgaacttggggcagggcaggtagttctggcagctagagttctcatttcaaatactttgatttcagtttctttcttcttgaggcttatttgcaaggtgagttttctgggtcaatgcaaagtaattttttatgctgcatggaatacgtaactttccaattagcactattaagccagagcaaacatttatgtttgagaaaacccgccaagcaaattcttactttggtcatgtgggcctgaatgtcagagtatttgatttaatatcgataaaagaatttgccactaatatttgagatattctttgaattttctttctgtgtagaaaggtcagaaaataacaattcacaaggatcacgtcttattttatttttaatatttaacacagcacataaattactctttaggagagttgacaaaaagttgaaactaattagctcttgtaaggaagactgagttctgccagtgttgagcaatgggttcttcttaagatccaggcacatattttaaagatcaagacataacatcatcagtatgttgaagtaatgcacagttgcatcaaaggctaaaatgtggagtagagaaatgtgccttgtcagatgtgagaaataatcttgccagctctttccctcccaccacttttttattcagtacttctggccttgggctgtaactgtttgcctactgattcaaagggtgaggaggcatggctctgttctgtatacaaaagggaagcctctttgttggctttgagatctgtactctctgtaggatctacattattaaaaaaatacttaaaaacttgaaaatttccctcaagccttgcacccagacactttacacgcatacatatacacaaatatgttgaagatcattcaattcaagttatttctaaggtattacctaaatagtaatagaacaattaagtttttttctaagatatactgaaagctacttttaagagtgatttttttttttactgtttctatcatatatttcattggcaggagcaatctgtttatctttcttgtgtaagagtattaataaatctaaaacatattaaacacaatatgtgccaggcattattctttgtgacaagaattcagtatgtcatttaaacctcctaacaactctatgtggtaaatactattattatagatatttttacttatagggaagtctagactgttccagaaagtttaagtaacttggccaagtgtacacagtaaagatttataatcattaagtctgtcttcagaatccatgttctcaaacatgacaatatattgtaagtaccaaattatttcaggagggcaacttaatcaaaatccaaagcaaacatgtttgtaagttataatggtatgatgaaagaatgcaaaaggttgaatattacaaaatcatttaggtaacaagttttgcttattttattctttgggccatagtccatagcaggaaacctttttgatcaagcttctttatatccatcacattctatgaacatgaaacataaattcagggggcatattagcactcttgtttctctccagtataagatgtgaagacatattgtctttgatataagatataaaggaagaggaaatccttaaaacttaaaagaaaacttagaggtaatgaacacgtctatgaactgcttttgagtcaattctccaaaaacattcatatttcttagagctttgagatataaagcaaaatattaagtatcaaggaatggtcatttaatcataagagaaaaatcatatagaggagaaaatatatataaaatccagatcaaaagtccaagaatattgtgaggcaccatgatgtgtagtggattaattgtgggctttagagttgaacagagctgaatttgaatcccagctctgggacttattagctgtgtgatcttagggatgcatctcactatctttaagctttgcaaaagatccactctgtgatagactaattgcaatgattaagtggactaaaatgcaaggtgtctactaaggttcatgatacagaacaggtgtttattaaatgtcaaaatccctttatctccttttcctcctgacagtagcaaagtaaaaagaggtttatcctggggacctgaagtgtgaaaggagtttcacagtggaattaatgggttaaagtttgtcaacatttttaagactttgagtcaactttactaaactactatgtaaaagcagttgcgcaatgcagatgttacctttttaattaagaaaacctgattttaccttgcctattaaaaatgtttatggttttgacttgaatctaagaagacaattagatgagatgtttaactacttgtataaactgatacctgaaagatgaatatatctctaattcttcgtcatttttatcagttcctttttattcattcttcacctgctgaggcttttagtacttgaataaaaaatttcagataaattggattttggtcatttctgtatatttttaaatcaactagtctagttctaacccttctttccacaaaagtgggtctgtgtttcctccattgtatctaccacatggtagataaaaaatttgcccatgaatgtataaagcaggttatttgcaattttatgtaaattaaaaagctatggggcctggcttggtggctcatgcctttaatcccaagactttggtaaaccaagtcaggagaatcgattgaacctgagaggcggaggttgcagtgagctgagattgccccactgcactccagcctgggcaacggaaagactctgtctccaaaaataataataataataattaattaattaattaactttttttaaaaagctatgaaaatgtagcagttgccaaggttagtttaaaaactgtcacagttgtagaaatcaagcatatataatagggaaagaaatagactacagattagattggccagcttcagtggctcatacctgtaatcccagcactttgggaggcctaggcaggtgcttagcttgagcccaggagtttgagaccagcctgggcaacatggacaaattccatctctacaaaaaatacaacaattagtcaggtgttgtggcatgggcctgaaattccagctactcaggaggctgagatgggaggatcacttgagcccagaaggtcaagcctgcagtgagccaggattgcatcactgcacttcagcctgggtgacagagagagatccaatttcaaaatatagatagatagatagatagatagagatagattagaagtcaatgaaatgaaaaattaatagtaggtaaatcagttgaatacaataatgctaattttgttgtgaacacttactaatcaatatactttagtggttcatattttcacaactgtataaattcatcctttttgaactttatggagcaaaagtgagtgtaaaacacatttgcaaatattctttaaagttattatttaccttttgctaatacgagtaaagatttatgaatttccattcaatgatcacttattgaatacctacagtatattgtcctaagtcctgcagatagttgaataaaacattgccattcaagatgttcacacgctctggggaagactatcaaacacagctgtaacagaaagcatcagagagtcataagaagaatgattttggggcagagattatgattaataacaatctggaacaattcctaaagcttcacagaagatgcggcatttgagttgggccattaaggatggcccacagccttccaggaagagcaaaaggaaatgtgcattctggacagatgaagcagaatgttttttgtgtggtctatttgtgttaatcttttgctatttattgctagccctatgtggccaagggatccaaacaaccacattttatcaccacttgtacaagttctcatacaaaggaagcactcagtaaatattgttttttaatatatgaatgaatgaacgaatgaacacacagatccttcttaatatgagatgataactttcaaataaaaattataccacattgagagttgtttttctttacctgataacagctatgcaattcaaaggacaatttaaattttctaaactctgagtaacaatcatctcggccgggcgcggtggctcacgcctgtaatcccagcactttgggaggccgaggtgggtggatcacgaggtcaggagattgagaccatcctggttaacacggtgaaaccccgtctctactaaaaaaaaaaaaaaaaaaaaaaattagctgggcgtgctggcgggcgcctgtagtcccagctactcaggagactgaggcaggaaaacggcgtaaacccgggaggcggagcttgcagtgagccgagattgtgcctactgcactccagcctgggcgacagagttagactccgtctccaaaaaaaaaaaagaaaaaaaaatcatctcaccaaattttaactcctgtgggttttagtcctagcactctgctcttctctttctataattaatttctacacttttgttggcttgtttaaatgcatgagttcaaatgtatcacttcataagttactccctgatttactcccctggatttgatcaattgagtgtatttactgttaatattgtttcccatctgcctattggataagcccttcttggttgaatcacactcactgaatacctgaatgtcttaatttgaactcatcatgttccttccaacttttcttgccaattcttccttttctggataattcctggggtgtatctgactcttttttctccctacccaaatcaacaatcaaccctggcataaattcttttgacatctttcacatttgtcagcttttagtcacaaactaaaacacttggcttattaccccaaatggccttcattcatttttcttcagtctcacagacagttaattgttctacatcctttcttgacgtaacatagacactttcatggtcatccctcatttactgataaagaaaacttctttttataaaatatcattaatttatttctgattagaaaagaacatgatttaatttataaaatatataaaataaggaaaataaataagtaaactcatacaagattttaactgtatatcatcttacagaaaacattcatattttgttatgtatgggattaacatatatacttttaaaaaacaaaattgtgattctattgtatatcgagtgtatccagttcttttttttttttttgagacagagttttgctcttgcccaggctggagtgcaatggcgcaatcttggctcaccgcaacctccacctcccaggttcaagcgattctcctgcctcagccttcccaagtagctgggattacaggcatgcgccaccaagtccggctaattttgtatttttagtagagatggggtttctccatgtgggtcaggctggtctcaaactcccgacctcaggtgatccgcctacctcggcctcccaaagtgctgggattacaggcgtgagccaccgcgcccggcctccagttctttcatttaacatttatgaaacatttgccatgtcttatgattacatattctttaagacttgctgagttgaatagcattactttaagagtaatacagagcaaagtctgaatctctccagtgggcttcttagctatgtgatcttgggtaagttactgaatatttttgagcttcagttttgtcatttgcaaaattgagatcttaatagttgtaatgaagatttaatgacatagtggatacaaagtatgccctgtgcattaatagctagtataaatgttagctacaatttctggtttcttatatctagatactatttcttcctatggctacatcatactttattggactgcacccccagttagacttattgcctgctaattcaatcttaagccttttgcctggctttcaggattccttataacctagcctgacctgactcacaacatttttcacaatttaaattctctcctctctgtaaccaatttctttccagttgcatgtgttcagtatgctgactttcaccttatctcccttactagaggttacctagtgttgtttgtgtatacaggaaacattcctgggtagaggggaaagctgattccatggggaactcagcagctgggatgtgccctcagaatcagtccaaatgagggctcagtgcaggttctttatgccctgcagtaactcgtaattggaaggtttcagttgagggccatcaaccaccaataatcagctggggaaatgaatggttcagtcctgaagggggcagctggtggcacaccacaatgtccattacaactgcttcataatactctctgtctttcattgtacttgaataaggcttttctcagttgtgttacccagatagagctatatgctagatgtcaaggctgaaatattgagtggtgatagataatgcaatatgtattgcattaacaggaaaagtactacaggcgccaactgaaagagctaatgatgacccaatctggaacaatttgcagagcataataaagtactattggattataatccaaagtataaaatataatatctatcatgagttcatatcattatgaataaataattgaatacataaataaatgagaagagataaatctcttgtgcagaaaaattccaaataatttgagtagacacaacatcctcaaagaggtagaaaataactcctttcttcttaattgtgggctacacatagtgacttctttcccaaaaatacagaggaaagcagcaggagacagactaacttttcagtggagaaacctgacaaacactatctcatcaaggtcaacatcggtagtgatgccatactgatattatagacccttgatatgatgtgatgaaaatggcacttttcctctgtggtcttcctcccaaaatctcatagccacagtctaatcatgagaaaaacaccaggcaaatcccaattgaaaggcattctacaaaatatctgtcaaactattaaggtcattaaaaacaaggaaagtctaagaaaatgtcacagtaaaaaggaaacattatgactacacgtaatgcggtatcctaaatgacactctgaaataccgtaagggcgtcagataaaaactaaagagatatcaggtatgggatttagttgacaatagcatatcaatgttagttcattaattgtaataaatgtaccatactaatgtaagatacaaataataggggaaactgggtatggaacagtataagaactttctgtactatcttcaaatttttttttgtaaatcaaaactattgtaaaaaaatatgttaaaaagaaatactattatcataggacctagcaattccacttctgtgtatatatccagaagatttgaaagcagggtgttgaggggatatttgtacactcatgttcatagtagcattatttataatattcaaaaggtgaaagtaactcaagtgtccattgatggatgaatacataaacaaaatacaatatatacatcagagtatttttatttaaggctttattcagcctaaaaaaggaaagaaattctggcacttgctgccacatagataaactttgagaacattatgctaagtgaaatgagctagtcacaaaaagacaaatactatatgattccacttataaaactagatagtaaaatttatagaaacagtaaaatgatggttgtcaggggttttgaaaagagaaatggaggtggtagtttaatgggtatgaaatttcagttttgcaagacaaaaaagttgtggagattggttgtataacaatatgaatataatgaggaatactgaactatatgcttaaaaatgattatgatacattttatatgattttaactataatttttaaaaagcactattaaaattaccattttcaatccatcagcctgataaaatcggtactgcacggatatgctatatctgtttcttttcagtttatgatcctcagtatactgtttggctaattacccagtgatctaaaacagtaaagaggttaagtaggataatcagtatcatccaaaagtatttgcaatgaatgctcatccaaaagcccatataaaagttacctggaaaccagcagatgggatgctcatgagaactcaggggttgaaggagaggaaagcatggattagcagcattttttgtcgtttttatgtctaaaataaagacttccttgagctgaggccacagtgctaattatatattaaggaatatttggttgatatcttttatttcctctttggaaacagaacaaacaaacatcctattacacacactctacatttctttcatttaaaactctacaacacaatgacagagaatagggacatattttctattagtgtccagtaatgtctggagatattagcagagtttgaaaaagatggcattaatatctgtgccacatatggcagtcgagttattttaattaaatggcaggttcagccaattgagatttgtcactgttttgagctccctttcctttttctcacttttttagattcagaatgtctttgacatccaaatatattacagtgtaattcctttggtgctcttttttttgggaagccaaaacaaactctttagaacatcacatttccaaaagaaagctgtaagacttaagagtgtgatcacagatacctcttgggtctcaatctgaatttagtgttaaacaaaggaagcaagtttatacttctgcagatcttcagggagcgtaataaccgtatatttggaatttcattgtatgtgatcttctttaaatgtcagaacaacctggagagacaggcaggattaatattattatgccatttgatgaacaaaggtctgtcattcacctccaggaaaggacatgactcctcaaaatcaccagctgataaatagatgagttgaaactagaactgagttcagtgcttctgcctatatgttgcaatgcccttaggacattcttttaccagtgcatttgtaagctatgtgagaagcaaaggagagagtaatcaaactatttgaaaactaacttagagtggctaacataatgatgttgacatttggggaaaaagatactttatttgagaatcatagtgaaatatctccaccacgtatagttcttgggttttatacaaattggaagttcagttactgtcccagtgtgaaaggtgtgtggaggatggattcgaaggggaatgactcaggcagggatactggtgagaaatgtcataacccctggaagaatgggtggaatggaagaagctatggctggggagagttgaactagatttgcccatgcaaatggaattggaatgaagagtgaattgaagaacattaagagcctggaatagatagaatttgatggtttattagaaaggaatagggaagagaagacagcagacaacgttgatccttgaatgcataatataaaactagactcttccctgctctgaataaccctagtatacaagcagaggaatgttgacattactggcctcacatctagaaaaagaaacagatgatcttcataaaatgaaagaaacatggctcattcatttttaacatctaagcatttactatgtgtctgctcaaatatgtagactgcctgagtgaaagggcgtctggttaacccagtgatcagctgtggccacctccacagaagtatatacataaatgaaaataactaggttgttttccagctatttaaagctaataactagtttttaaatggggacttttttacatataaatacctaaaagaatatgatctgcaaaaaatatgcaagttgattggctacctattcatagcaaaatgttagattacctctagatggtgaggcattatgcgtagactggattttactggattcatttctctccaaaaattccaatcactagatcttgtgattgaggaaaacaatgtccttgctccttggtatttaaattcaaagatgaacggttgcagggatatattgctttttaaagcacacatttgagaaaggctatcattcacctagtgaatctattttcaatggaaatttgaaaatctaaaaaaaaatcttgctttcttgtttattttactatttagtaagaatgtctctgactgttcatgttacacagttttagagcaaaacatgagaaagactgctcagaatacaattgatgtgtttgaatggtgaacaaaataatacaaagaaatacattccttatttatctgggtgtatggagctgcttactcaagaaaatttgtcctgctcttgctatcagagaaactgaataaaacaatttgggaaaaggaataaaaaagacaatgaatgttgttttaacaacatgtgacatttggtcactaagttagacttttttgtctaaggaacaacttgttcttttttgcaagagacaagcaactggagatgtttatcttaataaatctgttcctgcctttgtttccttcaggagtcatgctatactgaaaagacacttcatcaagataactctgggagaagcagaaaaccctgtgccagggacaggaaagataggagtaagtatatttttgttccattgatcttggaacatatggaataatatattgaagatgttcctaaaaatatatttgttgctataaagccagatgacagcaaagaaaatgtaaggtgggatatcttcattttagaaaacaatgtagtttaatataagattgatagaatatattgttaatttctaattaatagcaaacgatacatactgggaccttgagatacacattttcaactcatatctgccagggataagtgagcttggtttgatatttccactcttagctgtgcctacttaaatggttcttatagaggcagctagcccatcagaatagtattttgaaatttatagcctttaaaatagaagagaaattcatactgcctatcaggtcttataaactgactgcttttcttattactactctcctcagagaccatagtaatagaattataatcagtacctacaattaaatattcttgatgacactaataggtgaacataaacctcaagttaatacttgtttgagagacaggtttttgtgtgctggtatctcacagatatctgtcctatctatctatctatctatctatctatctatctatctatctatccatctatctatgacagatatctgtatatattcatacttgcctacacagtagtgcatcctttgaaaattgaggccacattcatattgcagtcttattagtatttcataaaaatattatcagtttgtaacaaggaacagaaaaccaaacactgcatgttctcactcataagtagggattaaacaatgagaacacatggacatagggaggggaacatcacacaccggggcctgtcagggagtgtggggcaaggggagggataacattaggagaaatacctaatgtagatgacgggttgatgggtgcagcaaaccaccatggcacgtgtatacctatgcaacaaacctgcacattctgcacatgtatcccagaacttaaagtataataaaaataaataaataataaataaataaatgttatcagcttggtaaaacttgtatttgagggcacctggaccccttagtgctacattctcctacccagagtgagaaccttgcttctccactgcagcttagatgacagagcaagagaacccaaggtcagctgcagcctgagggaaggctccaaagttcttctccccctctcagattcctactagaacacaactccagggaagcaggaaggagtggaagacataacatttggtttaggctcattgcctggtcttcttaaaaccagtgtacaactttcccattaaccctctgtgatttcatttaacattggcaataggttcattcccatggctcatcagagcatttttactttgatgtgaaaatttaaatttatgtcaacatgtctaaaaataaaaaaatacaaaaaaattagccgggtgtgatggcgggcgcctgtattcccagctactcaggaggctgaggaaggagaatggtgtgaacccgggaggcggagcttgcagtgagccgagatcacaccactgcactccagcctgggtgacagagcgagactccatctcaaagaaaaaaaaaaaaagaatagcatgtcttaattgaaacctacttttattataaaataatttcacacaaataattttacccaaaccatttatatttctacataaaccactagaatctccatactagaacaaaataagtagaattataatacgaattaattttgtacttaaggaaaattaaaactaacataaaataatttattgggtctatattgtgggctgagtatacagtgatttataagcataatcttctttaattcttacagtaactctatgaggaaggtaaggaaggcatggttatttcctgtgatacaagcataccttgccaaatgcacacatttagcaagtgggtggtgagttaagacttgagcctaattttgtcggaagcataagcctatgtccttgaccagcttgaatagaaatgtttgatgggagctaaaacactacgtttaagtgactatagtatcttattttcatcagctatttataatcaattactagaaatatacactcttaaggaacaaattatccctatattctatgaattctttgaaagagaaaacatttttctgatttatttaataagaagcacaataccaaaaaagtaaaaaaaaaaaaaaactaaaaaaagtatcacaaaaaagaaaatcataaaaattcattgaaatactagctaaataatgtagacatcaataaaatagaatacaacacatggtgtttattctaggaatgttaaagtggtttagtatcaggaaacttattaaagtgatttcatagtcttagactgaggaataaaacccctattttaacttccaaatagatttcaaatgacatttgataaaatgcaactatattacttttaagaaaccacacatacatgtagcatagtaatttaggaatagagagatgtcattaaaatataaaacttctgctttctgatttcaagaaagcagaaaaaccctagtggcttactacatgaccaatttcatcacttataattaatatcatttaacaaattttaaccaacgcaataaatgttttaaaagactaatattttcttcatttttcttatatatgctaggaactattctaaatgctttacaaatattaactcatttaatcctcacaacaaccctaggagatatggactactatcattctattttacaaattaggaagctgaggccaagagatgctaagtaacaaggccaaggtcatgaagctaataagtagcagagctgaattaaaactcatgtggtttgatctatgagtctttaatcataaataccatgttgtgctgcctctcaaaggttataattattagaaaaaatgttatatttttgctaaaaatatatattttactaaaaatcccaagagaattaactgaagaaccattagggtaatgaactttgttaagtaactatacaaaagataaatgtgtaaaaatcagttgatttttctatgacagcaacaaataaaaaacatttaaaaatctcatcataacaattaaatattatatagctatgaataaactattaaagaaatgtacaagacttaagaaaataacatctattgagaaacataagataaacaattggctgttaagtatgttatgcagaaagaaaaaatagcagtaatgaaggtttatattgtattcttggatgagaataatagatgttgtacacgttagcttcctcaaattaatttataaagttagtacaatttcatttaaaatccaaaaaaggatttgggagagatcttggcaaaatgattattaaaattcatttggaagtatggacagtctggaaaaggcatatttttgaaaaaagaagaaagttgaaacttgctatttcccagtattaaagcatattaaaaagttacaattattaaaattgtgtggtactatttactaatacagaaacttagagaagccaaatcagtttgagaattccccaaacagatcaaagcacatgtaaaagtaatgcataagaaagaccacatttcatgttgatggagaaagtaatgactattcaaaaagcacaacaacaataattagttaatgttaggaaaacatgtaaatttggatattttatttatacaatatacaaatacttgtcagattgataaaagcagaacaatgacagagacataactggaggaaaatagattggcaaataatttcataatcttgtctaacatgacatcaaaggcaaaaatcataattggagattgatagacttgattgtagatatattaaaacttctatacatataaaacagagaagagactcaaatagcatgaacctaataaatgtttgaaaattgctttttcttgattttttgaggggaaatggaattaatgaatcaataaattctgactaacattccaatatattactgtttgatggcttagtaaagcagaaatttttctgggatagtactaatttgctattttatctcctgaaggcacacagcatcacagaaatttttgtgtgaagaatacataatatatcttagttaaaaataaagatgaaggccaggtgcggtggctcatgcctgtaatcccaacactttgggaggccgaggcaggtggatcacgaggtcaggagattgagaccatcctgactaacacactgaaaccctatctctactaaaaatacaaaaaattagctgggcgtggtggcaggtgcctgtagtcccacatacttgggaggctgaggcaggagaatggcctgaactcaggagacggagcttgcagtgagcagagatcacgtcactgcatccagcctgggtgacagagcaagactccgtctcaaaaaaaaaaaaaatcataataattaataaataaataaataaagatgaagttctagtaaagaccagtgataatatggaaagatgaattgttccacctaaaaagatcaattaaatttggcttaaagtatccaagagagtagaggatttcaacaagacagttttataattcttatacgtgccaaggcattttatttcagtagaaattatttgcaacctccttgagtaatctctgaattaaaataacatgttaaaataagttatcactaataaaaatgaaataattcaatttctgtcttgaataatgcagtagataatcgcagaggagtgacacaatgataaaatttggagagaaatgtttcctgttttatggaagttgatgatacaagaaagtttatttgcttccttccagagtactgctgctccttcaatgctggggactcagaggaagtatgaaaggaaaatgtattataattaatgaccaataatttttttaaagttttaatttagggaaaatattcaaggttgtaccagcctgtactataacaatcaactaacactaacaaagtagcaattttctgtcccaggccatattagcataattactagactctgaggaccaaatatctcatgggaaagagtaaccagtgtacccgtgaactttctagtctttctgttcacatccagcccctatccatgattctggccaatgcgttgactcctgttcactgctgttcctccagagagcactcactctgcttcatgtcctcccactagcagtctctcagctgacagggaatctgctccccaacctgtgttgcccttttgtttcagggctcaaattgccccaagttctgccttcagccattcatctcttgccttctaaccccgatcattttctcagtattgcgtttagcacttcaactctttttatccatccaccttaaagagttttttcccttacttacacaaggactgggactgttaagaagtggatttttgccaggcaggtcttggtcctggggtttggttaacagccatcatcattgtccttcctataagaacttttagacattcatgaagttatatccctggcagattcatcctgctggctcaggagatgtgcctaaaagtgcctgaaactaaaaaaagactacagaatagaccttagctctaatacccttgctaaataaacattgatttttaaacatgtatctttatttgttcataaatctacacttagtacatatattcttttaccaccaccagaaaaaagtctggaagtagtcaaaagaactgtgtaaaatgttttcttctcttggctaataaaggcaaaagagaaacttagccattttgttttaagcacgactaaccaaatcaaacaagcataaccctaaacttaaagaataaatcttgttaatgttcatgctagccagactgtcactttttgaagactgtccaaacactgtaagcagtgaattctcgaggggaaaatggaaaacaaaacaaaacaaccaacaaacaaaggagcagaacacacagatacccttgtcaaggagagtaaagggaatatatacaaagaatgaaggtgatcattaacagattagcactaattcttagtgatcaaagtcattgtcaattaatgtttgcagtgtgccaaactcattttctcaattcttcattccgtaagtgttctttgagtgcttattccatttaccctgtgccctgcactgttgtgagctgtggggatcagagctaaagacactgcaattctccagagtctgtgaatcactagcatggaaattttgaactagagaaaaattgactagaggagtgtgaggagacccaaaaggtgttatatcaggagtggctgatgttttctttgtggaggtcctagagaagatgcgctaactttcttcaattacgtgagaaatatcatgtcaaaaaaatctgtgtgattgagaagggaaaactagatttgaatggatggaattagaggagaaaacatttttgcttaatcaagggaaaggcttcctgaaattataacaagctacctgtgataactgagttgattggtcataagtgggagggtgacgggttggttttggaggtgggtaattaattcatctccaaagacaaaagttccagggtctgttgttgaaaccattgatgtgggaagggttcgcctgaagacaatacaataagggactacaaggctgcttttgagttagatctaccagctttgtcacttactcttaggctttgaccaaatctctcatctctgatccttagtgcctacatcagagaaaaggagatagtacgtgtcacggggctgtggtgagaagagaaaaaaataatgagtgtaaatgaactaattcaaaatggttgctatatagtggacactcaatagatggtactcaattcatgggaactagaatgtcatcttgggaaacatttggactcccttaaacaacccagaaagttaaaatgacacccactaacgtaaaaagatcctctcttcttatttgggattcataaaaacaaaatgtttctaaaatgtacagtgagaaatgctaaacatatacaacattagaaaagctgccaagacaattgttctacttcattaccatttccttattatttacctattcttagttgctggaaagattttttttagctcaatttctactttgtagtattctaagagacctgtactgtcaacttcagtttgtcatatcaaagaagatcttggacaacacgttgtgacatgttcaaagagagcctgctcatgcaagttggatgagtttgaaagttgctagggtttagttctaagtatctgtgttgtaatcaattcctatttttcaatcatgtcgttggtatcaactgttgcataatttgaactagccagtaaaaagtccagaaggactcaggtggtgaactagagcaagattatgccaacatgagacacataaagcaattagtgattgccggtaagaacgttaactcaacgaactgtggttcacttctcacatgcctaccagctgcaataatgaatatttaaataaataaatatttcaatactgtgagctcacttttccaggcctatcttaggttagtttcaccttctctttgttttcatagtctgtgttctgttttttattcgtgtaattcatattatacgaatatgaatttcaataatgagacatttaaataatgaagagaacaaagaataaaatcaatttcccacctcccaaaattgactcattttattttataatgtctgcttaaagtctcctttataaagaaataaaatgcaacagttaagtctcctctcagaagctcctatgaattagtatgcattgttccagtctattttatattttcactcatgtatttatacaaccattccaatatttagtcttgatttgtgttttttaacttacaaaaataatatcacacttcttttcaaaagattgtttttgaaatatatgtagatatatatagttctagctctgttctccctgtgaaatttgtatttcacttggtaaatgaaacacttcatttgctattcacatctagtggccttccctactcctaaattgggcccatggatagcagaacgttattgctagaaaagttggaagaaaacatcattctaatttatggctttatatattaccagtgctgggaacttttgaaaatggcaaaagctaaactggatgggaagtcaggaaaatatgaataaactagaattttcccaggcaaaccacaatgaaggatcagattgcatatgaagaaaacaaagcttcgagaggtgatgtgactttctggtgttaaagccaaataattaggaggccattcatctagggttgtttctgtttccagaacccttatacaagccacaccaaaagttaacttagaggcattccttgttactgcttattattattattattttttgagatggagtcttactctgtcactcaggccagagggcaaccacatgatctccgctcactgcaacctctgcctcctgggttcaagtgattctcctgcctcagcctcccgagtagctgggactgcaggcacatgccatcacacctggctcattttttatttttagtagagaccaggtttcaccatattggccaggctggtctcaaactacagacctcagatgatctgcccaactcggcctcccaaagtgctgggattgcaggcgtgagccacagctcccagctgttactgattaattttgaattgagcttcagccaatcacagacacccagctagctgattgattatataacaagagacctcccattgaactgtacggaaatacatagctatagttaatcaagtaattttttttactttgtttccatgttcagactataaaagcccactgcttaggctgctagagcagagctctttgaacctctttcagttttgattattcattcttttcttaaataaactcttaaatttattttgtctaaagttgttcttttaacactgggttacatagctagttaatgacagtgcttgaaatatccagcccaaatctcaaaatcaaaatattgcatggggcaagagatagaaagcttttctagttcattgttctgtttgttattctgctgcttatgtttaaaaaacacgcagagagctaagataaggcattcttagagacacctcgttagaaaaatgaagtctgataccttgctttcacaatggctggtaagagtatagttttaatctatcattgtttccttatgcttgctatctcacatgccaggtaaagctatttgctccctcttctcactctatcccatttgtccctctaggtaggagaatgtggtctggaaaataaggtgtcactggtgatcagacatcatcacttgtctagtgactgtcagcttagttttgtcctacagttgtcttgatttccggctagttaatgagtgtgacatatctttaaggtttgggtgtgccaatgtactggagacagaaaattgactcactaattaaaacatagcctgaaacttgcatgttcaatacaggcctgcaatttcctttacctaggcttggtctcaggtattcttcatagtcaaggtgatattactattgtatcactatgattcatggtgttaggacaccaaattcctcattacatctttattttaaacttctaaactagtatagctcctaggattaaaaggattgcagatttttaatttttttaaaaaagaggcagtatttaggtgtacctggtaggggagagaacaagcataaggaaaaatgaataaattaaagctatattgttaccagccattttgaagacaaggtaaagctttttcatttttctaatgaggcagctctaagaatgcattatcttagttccctacatgttttctaaacataagaagcagcataacaaacagaacaaaggagtagaaagctttctatttcttaccccatgcaattgtttgattttgagatttgagctaggtatttcaaggactgccattaaccagctatgtaacctggtgttaactattaagttttactcacttcaaatttgattttgtttctccaaaacgttttgcacatttataagataattaaaaatcagcatttttagaaggcagctatgatcaccactctatcaccaatgtcactaaaatcagtattcttgattgcctgctggaaataaaaatgtaattgctaaaatactcagtataagttaagtgatacgttacaagtaaagatctctcatgtgttaagtttcaagtttcacttaatgttcttaataaaataatggtaatttgaattctctacaaatacgttcagcctgtagtattctaatttacagatgcttgagaacacctaatatttttgattaacttaatgtcaaactattatcctaccttgtaaatagcatagaaattttaactatagtctttaaaaaatcaaatttcattggtagggaagtgtaaatgtatggtttttttaaaacacaacattaaaaggttgaggttataactttcataaagatgaaatcactatttaaaagctgcacatagactgattattattgtttgtttgtcttagaagatgtatctttaaattgctggaagacatcatgaatattttcattgctaattattggtaaagtctttagtatatgtcagttctgtttgtgtgggtatggttgctgtagtgcggcttaaaaaaaaacagtgcttcatatcagtgaaagctcttctttggtttaatctgggttgtggttatattgttttttcatatcgtgtgagctgattgcaaggggttaacccaaaatgagccacttcacttaaaattattctatatgttagtttgtgaattctgttgttggtatttaaacgtacatcatagtttaatcatatcacataaagttgtgatttcaggaatactttatatttcttttgctgtttttgcttgtgacaattgactggtccaccacatagaatttcttagtctttctaacactaggtgaacatttgaactgaccagatgattttatggaaacagcatgagacagtggaagtcaaatctctattctgtaccttgctttgcccctttctggctacaggagcctcagaagtcattcagagatgcagcaaagtgcaggggatcaaaccattgatcgctgaatttgagtcttacttttgtcatttattattagctgtgtgacagctagtaaattaacttaatctctctgtctctgtgttttcatttgtaaatggtattaatattagtgcctctcccccagcgttcttaagaagattaaagcggttgatatttgtaaagtacttagaatattgcctgtacagctaattatttaataacattttaatgtgatgtgacctcattagatctgatgtctacaaacagtactttgagtttgagaattgttatcattttaagtgtttcttgcctttgttttcaatacatcttgaaattattaaacttaaactggtgaaaacattgtttctatgtggagtattaatgattatacagctaacactgatgatttctttgtcatttgttttaaatcaaggcacatttgcagaaataaaggactgctttaaaaactagcaaaatattcatatatcttagagttgtatggactgtgacaactcctgtaactgggtttggaacttgtttctgcattaggtacacattttatctcctaaagggttaatgtcatttattttatttttcaatttttgtctttataactgtgctattagatggcagactgtttggaaagctgaatttgattattgcttttcagttctttattggcagtgaaaatattctgctgtttatcacttttctttagtacaggttggtacatgacttctatcttttagggttatcatacacacataactctttcttaaataatccacaatctgttttaattattcttaaaacctgttaagttggcatattttataggacaaagagtagtgtaacttgtcagtataagagttggtggtagaggatggggttagtttgttttttaatgacggcatggtctccagtgtgaaagaggccattggaattggaacttgtttccgctgatgggagaaagtccaaccgagctagtaggctgattatctggagagaataatgatgtcaacaggaggttgtcctggcagatagggggtcggagtccactaggaccagcaaggtgcagcagatggtgtcccagcaggtgggtgggttgtggtgacacagagtctggaagcagacaatatccaggcagataaacagatagatatgttcacagattgtgggtcccaaggattggggctgaggctggggcctgaaatacaggccctgggaaacctggatagaccagcacagaggccaatcttggagggagtagtgaactacatagggcattaaagcagagactctgttaggtggggccacgggttaaaggatacttgtgacatcctcaggtttgggggttatgtggattggaaggatactggagctgggagccaggaaggtctttaaagatgctgacttccatattccttagtgcagactcatgtgatggtcaccttttgaaaactgaaaaactcaagtgtgttaattacaaaattgtgctttactttattactgatgaagagattaaaagacaactttgatacaatcagccttgccttttttttttgcaaaggtcatagtaaccttcagatcagacttaacttcctgcggttgaaactgctcacatggggcctaggcgaagtgaagcacgcaatatggaggtgttattattccttattctgcttagatttatccttaggaagaggttatctatctaagaagaaagtataaaatgaaagaattaggaagtagatctttgtttttgactgaagcttgcttgtaatagaagagaaaattatgtggaagttgctgaaattaatttccttacaataatatgagtgttaactggctttttccctgacagtcattatttgggggaatatcagccccagttacattatttgggaatgccctacatcaaaccagggccttcacttctaaggactaagaaaaaaattgaatagtgactcttttgcttgagtcttagcatttaacagccttctattattgatcttagactttatgtgtacctatatatttgaagtcaaagaaaaatgaaaccctcaaaacaaaatctaagcattctcatgctttacattttgaaattaaatctccagttgatgttcacttttaaaaaatctaagttactatgaagtttcaaagtgctatcattgtttttccaagtactactttcgatagaggaaaaaatccgtgtttctttttattagattctttacaatggtgaaccttgtctagagaaacaatgcattcatttattaaatagaagttaatttatgtaattaaaataaaatttttctgtcataaaatatagcttcaaattatcacctctgtgactttggggcaagtagtttattatattgggttttagtttcatatctcaatttacaccttcttcatagaaatactatatttctagtacacccttgggaatcatgatggatgacaaagctttccttttttaatggaatttttcttactggaagtcattttaatattttccacttttacatgccctcacaatctatatgcaattttattttaatattttccacttttacatgccctcacaatctatatgcaattttatcagtcaggcttccaccagagaaacagatgaaaaacagagaaacagaaccagtaggagatatacattaagaaacttattgtgaggaatgggcttaaggaatccacacactcgcagaagagtagggtggaaactctggggcaagagttcgagcttcagtccacaggtagaatttctttttcctcaggaaaaacctcagttctgctgttaagccctttcagatgattgaatctggaccactaagatattgaggataatcttcttcacttaaagtcaattgattgcagatattagtcacatttataaaattccttcacacaaacacctaggtgagtgtccgattgattaactggggactatagactagtcaggttgacgcatgaagctgatcaccacatcacagtccacactttgcaactttagactcatgcacatttcctgaaaccatatttaatctcaaaataaagaacatagcaaagtcattcttccacctaatgcaatacagctatcttgaagcatgttttccagcccaaaacatggtaaccctttccctagaagaggatgcaatgtcattcactgttctccttgacattctgtagcttaaacactgtgatgtaaagttagctattatgaatatatcttacgttagataataatgacaaaagaggaaagaaagcaaaaatcttaaatacatgtgcacacacatttctaacaaaataagggatgcttaaaatttacagaattgcttctagaactggccatgtggtcaatgctggtatttatgattcccttcttccattacccatttcataattctctgctcttaagcaggcacctcagctgctcatggttcttagcctggcggcgtgacccaaaccttcattcctgaagggactgggccattagcagtcctgtctgaattgaattattgtggttttcttcacagaatgtggtagtaataagagatgccctcagggatctcctgtgtttcagacaggctcatccttacctccactgcgtggtatagcccaatttccccttggtaatcaggattcaccaccccaaccaatatagtaacttccttctttgcctgttgattcagaggtctggggagcccaaagtgactggtggcagccttaactcctagttcagtggaaccctttcgtctcctagtggaagaacacctccctttgaaactaagacctctccaccagcacagcataaggttgtggggacatgaagcaaaatttctctggtggattgctaagtgtaataattagtgatgccactctcattttcaccccttgattgttggattcacgaattctggcaataggagatcaagcaccacatattgagcacatacatatttagatttagaacatatacagcctcctagaggatatttctagagcccagcaaaatactgccacctactaggcactataactgagttttcaaaggccattccactgttttctattatgccatctaactcaggatgatggagaacatggtaagatcagtgaattagagtttctttgcttcatttgctgtgaagtaagctccttgatcagaagcaatgctgtgtggattactgtaagcatggatgaattattctgtaaatttgaggaggtagttttgacagaaactttacatgagggagagtaaatttatatccatagtaagtatataattccagtaataacaaagcagcactttttccaagatagaagaagtctcatacaatcaacctgtgaccacgtagcttggttaatcacccagggaatgataccatattggggactcagtgttggtctctgctgctggcagattggccactcagcagtggctgaagtcaggttggcccatctccaacttccttgttgagtggaagtccatgttgctgagcccacgcataaccttcatgcctccccatggccattgttcacaagccctctggtcaaagacagcagtggctggggaaagaagtgcagtatccacagaatgggtcattctacccacttgattattaaaattctcctctgctgaggtcatcttttggtgaacatttacatgggacatgaatgttatgttctatgtccatttagagaggtctatctgcatacctcttctcagctatccttgtcaccaatttttcagtcatgttccttttaagttgatggccatctccaaactgttgaccacagcccatcagtcaatatagtcttgtacgtctggccatttctccttccaagtagaatgaacacccagcttcactgctcaaagttgtgtccactaggaagacttctctttagcactgtccttcagatatgtactagaaaggggttgtagtgcaatcactctctacattcagtagagcattggcattggcatatcatgcaagaccatctgtaaaccactctgaaatcttgtttcctcagtcaattggttgctgggaactccccaggagaccctaggtactgactggtagagagaagataaaggcaggagtggggaccatgggatttgggccacttccttatgtagattacttgagcctgtttcagctcaatcttatatataccacttccatttgatattggggtgtggctgtacatacccaacgttaaaatgcttggtgggtcagacaacaaccatttaatgatgggcagcttagatttcatagtaacttggtggcccatggtgaggtgttcagtttctatataggcccagtagcaggcaaaaagctgtttctcaaaagaagagtagctgtcttcagaagatggcagggttttggaacaaagcctcagagtttgcactgtgattcaccttcagggatctgccaaaggctgcagtcaacatctctatctgctactggcacttcaagcaccatcaccggatctgatgaatcatatgttccaaatgacaaagaagcttacatggcagcttggacttgttatagagccttctcttatttgggtacccacctaaaactagcagctttttgggtcactcgataaattggccaaagtagtacaccgaaataaagaataagttgcttctaaaatccaaagaggcccacttggcattgtgcttcatttttggttgtatgagaagccaaatgcaacaacttaatgtttactttagaaaggatatgtctaacatgccccatactactagatccctgggaatttcatcgaggtggcaggccctacacagaccaagtagacgagtaaatgagatgtgatgggaatcatcacccctgcatccttcaagcccttaatggtggcattgagctctgcaatccctctaggaatatagatttgcttatgatttacactttttctaagtggagacagctctggtgatttctacttggcctcactccatagttcagtagtgttataacccttgtttatatacagattaagaatttagtagattacctatttcttttctagaaacaccatgatcaactagccaattccaaaggtctccacaagttagactattctgattactgcattgtctttgctgttcactgtgtaaccacatcaatcttgtctttgatgattaaggctgcctgggagccaattatccttattgcatttaggtatcccacccagttcagtggcagcaattcccactgtaatgtctgacctgtaagaaggatgaccacagagctctttaagggtgctggggcccccctcacaaatttatttctcaccatcatgatgaaatgtgtgtcctaaggactctcctggggtatgtgagcaggtcttacatgataaatttattctactatttcgatctccctctctagcctttggataacttcctcttcagtgtagcaaggcagttaattctggcatttgatttcatttaatgtagaccgccttgtagtccatgtttcagccaacgaaccaaactgttagagccttttctaaccctttgagctaaaatactgaatccagaatctctgcttagtgggatgatatcaataaattcatcctaattcaactttatgggaattttactatggtggaaggccctacacaagccaaatagacgagtgaaacaagatgtggtgggaatcattacccctgcatccttcaagtccttgatggtggcactaatccctataatccctctaggaatgcacttgataggaaatgatttatgtgattcaagtttatgttccttccacaattatcccacatacttaatattcatttacgtattccccagattgtataaattggaaaactcatgcaattcgtttggtatgtagcacacttccttgtggactacactttgtaccttaatctttagggcctgctggtacttgagtcttgttataagtctagaagcaaagaggggtgtcagggataagttctgaggagaatcaacagggtcttgcaagacacctacctcaggagcagccattactggttctttaggcaacgcagagttaacctcagacaggggtgaaaagatttttctattggcaaataaactcatcagaatttagagatttgatgtcacaagtttgagtgggatttcccatatgtccccattctaattttcaagatcccatttgttctcaatcaatcctcctactttaacaggagaaattcattttgtgttgtaattcagcaacacacagtgtgagagtctggttttgaaatcttagccctgtggttataggagataaggatttgcttttgggcagacacagaagtattcaggttatttatacagagcttgaacaggaaatttcaagccctgagtttatctttttctttccattttccatagtacagttggcagcaacctgccaatttcatcatactctttagtttggctaaaatgctctaaggcatgaaatatatggtcacctaaaaccttgccttttacaaatatttgattatgagtactcagtggtgatatttgtgtttctccattgccacatcatgccatagactaccagtaccctcttcacaactgagaattgtctttaatacctttaaatttaatcacattagagaacatattccaagaataacagaaccaaaccaattcataaagcttatccttaaaaattctattcttatggaaccactcttagggcagaaatctgtatgggtcagtcagggctccaccagaaaaacagaaattgctctgacataactttaggtgcaatttatggagaatgtacatgtatgtatatacatacctatatatatatgttgtgtgcatatatgttggtttgtgtgtgtgtgtgtgtgtgtgtgtgtgtgtgtgtgtgtgtggagagagagagatttattgaaaagaattgatttatgtgattatggaggctggctgggcaagtccaaaatctttagggcaatctgcaagctgggaattccttggaggaaacttaagctgcatgttttcttcatcagggaaagcactcatctgttcttttgatgattgagtcaaacccacccagattattgatgataatctcctttacttaaatcaactgattatagatgttacatatatctacaaaattcctttaccacaccacctagattaatgtttgattgaacaactggggcctatggcctaactaaacagtagtttaactttgctctggatgactcagagtcatcccacatgtaggcagatgtaggtgctgtgtccacaaagattgaagctaattatccgcacaggctctagaacttggtttcttgaagaagttgtaggtaataatctctttttctttaaaacatagaatgaaatattgcggccacaaaatgctccttggtagcatgatttggctcttcccccggttccccatcccccactaagatttaattgaggtggtcttttctcaacagatttttgttcattcttcagaaaattgcctgtggtctattgttattaacctctttgaattgacacatccataacagagtggggtcatcctgatctttgggtccaggacccttttcaattgtactcatgtattgctgcctgtgcaggggctaattctgctaataggtttggagtttggttttgtttggctagtcaggaagaattctaggattggaaagttccagaaaactggtccctggatagctgagctttctcagtctattacttaaaatgtttaaaatgtactaaaaagaaaataatgaggttgatacatgactagagtgatctcttggctgagtgaaaggagcacattcctgggtgaacatttgattagtcatcatcaagcaaggtgaaagggcttcctggattgtttttccaggtgactagcatctccacccaagctcttgtgatttgcttatgtggaataatggtgtgtgttgggctgttctcctctcttgcatgtgttctggcgaccaagaggaaagacataaattgctccgacaggattgcaggtgccaatctacagctgtgagagagatttttatgaagaacctctagagcaggttttctgatgttttatcattcaaacctggtggggcgggatgaggtggggggaatttgactccgaaacatgtactttattctctctattaaactcaatgcattttctttaatgtaacttgaagggattatttgaaaaaaaaaaaaaaattggagttaaggggcttcctggccaggcgcagtggctcccgcctgtaatcccagcactttgggaggtcgaggcgggcggatcatttgaggtcaggagttccagaccagcctggccaacatggtgaaaccctgtctctactaaaagtacaaaaattagctgggcatggtgacgcactgtagtcccaactactcggaaggctgaggcaggagaatggcttgaacctgagaggcggaggttgcagttagcggagatcgcgccattacactccagcctgagcaacagagagagactctgtctcaaaacgaacaaacaaaaaaggcagggtgggggcatcctaacaatcaacagttccctctttcactggctgcctttccccgtctccaattatggtcagcaagatatgcacctctattttattttaggccagataatgttagtgcttgaagccaacctgatagtttccattgcctcgtctagtctttcttaagccctatctttatgttctgctctgtcaataagatgaagtgtgaagaatttagggtttggagtcagaccagggtttggattcttcttaggaggttagctgatttcctcataaagacaatgtagataattcagagcattctgttggaataagatcatgtttgtgtaaagtgcatagtacaggatagatgcaaagtgtattttccttgctgccaaccctccatttcctgaacacaaaaatatgggaacaaataggattttgagtggagatgagagttgtccttcctgccatttcttccagtcctttaactgtgactccatatcttacatgctaaaggtaaactcacacaagttgctatttacctctagaatattgtttgtattaataatgggcatttattgaaggtctgctatgtacagggttcttaaccaaggctaagtaggaccataaatatcggtcaatattattatgcgattgcagattttaagaatgtaaacctacattttggtgttctatcctcaactttcaaaaacagaggtaagccttattcccagtcatcagttgttatatttttctgtactgatttactcataacctgtctgaatatattacactagatttctatttttttaacttcatactatttcacaattttagtgttagaaagagaaatgtatcttaatacttcagatttttttcttgtaggagaaaaatatgactcatgttaggtcactttttggttcattctcctaatataattagaaacttaaattacttttggccttcatgttttctctcctgcatttcagttaatattcagagattttttgtttgtttgttcatttgtttttgagacagaatttaactcttttgcccaggctttgcccaggctggagtgaagtggcatgatctcagcccattgcaacctccacccccagggttcaaaagattctcctgccacagcctcccaagtagattagatccagggacttttaattcctatgtataagtaccatatagtctgcttatcattataaaaattcattgtttcaataaaaacatattgagggcctaaaaatgtggcacaaaaaatggaaatggtacctgactgctagagacagaatatttgtgttctcctctccacctaaaaatgtttatatgttgaaatcataaataccaaggtgatggttttaggaggtgtggaacctttgttaggtgactaggccatgcaagtggagccctcatgaatggaattagtgccttttgaaaagagatccaggagaactccctctcttttcctcatgtgaggatacagcaagaatgtagccatttatgaaccagaaagcaggccctcaccagagactgaatctgctggtgcctccatcttggacttctcagcctccagaactgtgagaaataaatttttgttgtttataagctgcccactctatgggattctgttgtagcagcccagacagatgaagacactgccttcatggaggtaacagtctagtagagaagacagacataaataaataaaagtacacatatatagaattatgggaaaaatatatatttctaaagagaataaccttaatattgataatgctcataaaaacaacttactttttaaaaaattggatagcctttataaggctctctaattattgactattatactagcctatataaggaaaaaaagtcattttaggtttattcttctatgtataaaatactgagaaagaagtagctatttatgttctgtccagctctagagctttgaaacaaaaacttaaaaaggtgcttgaaattgtaaaaattgagctcaacggtaaccatattatatttttgtatttttttctccccttgataataatttatcttttatggtattgtgagttttgtttgtctgggtgtgatataatattcttaagagattctttttctttctttctaggaaatcttcaggcttagcacttacaaatatttatatataaaaacaattgactatgcaactattgtatgcaccagtataatctgaccagatgactttttgtctccattaaataaaagatctgataagtctgttacataaaagaatagtgtgttgtagacatatcgtgaaagttcaaatcctctttcagagaatagtaacaattctataaatctcattttttattttaggtaaactgcacactaagactttaagcatattgctatacagttgaaaagaatcagttcatggagaattaaataaaattttttacttaagtatattttaaatatagtatttgaatttgagagaaattaaaatttgcctattgtgctaagaaattgttcccataacatcaagcaaagctttttagccaaactgatgtatcactactgagatttgtccccattcatgccacatatctggctgtcactgcccctgacccacagtgaggcagggccatggagttgcagctttagctcttcagccagaaacccaggcgggagaagtgagggggcaagaaagttgatgggggtgtcaggtgtccagggagtggaacatgagagaaacaagggaattctgaaattatggatgtagtactgaggatgtcaaagcagaactggcttatggataaaagccagtaaaggcaagaccaccaatgatccatatgtttgctctatgcacactagctatatttgccacgtacatctccaggttgttcacctcctcaaagaggctgtctctgtctcctcatctaatttaaatactccttaagttctcattattatctaatgacttatttttccctttcagaattgtaaattgtaaattatatatttgattacttatatatgttctatattctcttttagtcttcaattaaaataaattttattgtgcatatttgaggtttataacatgatgctatggaatatatacagatagtaaaatagttaaagtagtgaagcagattaacatatctgtcatctcacgtagctacttcttattttgtctttaaggcttttttacaccaactatcttccagttgttcaataaacatttgttaaacgaatgaatgatgaccaaagctttcaaccggttgctgttggtgtttccctttatccaataggacttgagtctaaaattgctactcatggctacatattcattaggggcacacatgaacatcaccaaaatgcttggaaatgtgcacattttttcaaagtggttattccgttggcttgcaatagatgttagtgatcacctacccccaaaatgcagctatttatccgaacataatatcacaattatgttagtgtaataaattgttttttattggtgtcaatgatagatgtagatgatattttggagctaacttggctttcatttttagtgaagtatgtagaatttcatactgaggggaatttatgagtgaatgattgcagaagtattgggattgtctctagttttgggcatatctgcaatgctacttcctttttcatcatggtttagcaggaattgcttggaatctttcttacattgatatttccagaaaactctgttgatatttgttgctctttttttagctgtatgtttctaatctttgaaagatatggaagcaatccaatttaaacactggctttcagccacatctcaatatactcataaaaccaataaaaattctttcagtccagcttcacagatacaggaatcatgcagctctttcttgagccattaagggacataactaaagataagggttttgtcatatatcagatatgtgtggtgtgtacgctagccttaaagataaactcacaaattctaattttctgctattgtcctgaatcactggattaagctctttatatcatgttgattaagatatacactaaaattaaatttactaatcttttatgcaaattcaaagaaaaagcttcctgaaaccttagcttattaatttaaaataatttaaaatattatgtacttttaatctgggagtctaaaatatttttgtaatagattggttttgtgctggttctggaataattaattgaaaatattagacataacttatatttgcagaactagtttgggccaagtcatgtatattattccttgacaacatcaggcacacatgaccactaaattagttactgtataattataataattaaatgatttttactaagtgatgaatcagatttgatttacaaattcataaaagtaatgatacaattattggctacatcttactctaccacagagtaggaaatgtattggcttagtttgctgagtgctttaagattataatttaaatactgtcccttgagatgttaataaatccaattccttgatatttcactttcactaattgccttcattcatttatactcttattttttgtattctaaagcttgaaattgttgttttcataatgatgtgatgcacagatcactatggaagtgtaacataaacttggagttcaagcttgatttttccttattagtggggaccctctctgggcagaggtctttctgaattaaggccaggggaaagccttgtttgttggcaaaagcagacctatctcaggaccactactggctgcaacatcctcttaccttaaatctgaactaggaatcactgaagataagggatcttggtaatgttaaatgtttatgttaacagtagcatttattcatttgttaagcattcatttgacaaattttttattgagtacctacttaccatctgccaggcactcctctagatactgggaatatagggttgaacaaaaaagaatcatagcctaatggaacacccatttttaaaataatattaaacagtaagcttgaattatataatattattaatcaaagcaacttttcataaggaatgaaaactacactttaccaaatagaagtcatatgaacttttaaaatgaatagacatttctatttgcatatttttacatggaaatgaatgcttctaaacactttaaaataatttgtttcctgacaaagtttaaagatctctagctctcattagaatttcatttagtctgtaattgacttagcaagttaatgaggctttatatacatataaaataaacttgaatgtatttttaaatgtctacatatagagttctacgtacatgtggatactctttagaaagatattttcaaaattgttgacatctgaaagattcattccttactgtgctgtttccctcagagattatgcaaaatttaattatgcttttaaagacattgtgcataatcgatctatggataaatcaaactgaatatgaaatcattttgtaagaccatttggttcttatatgatctagttataggtacttgattgttttccccacaaaagtactgagtaaacttaacttagtgaaaggaatatgattttcctttcaaacagtgaaacggcaagagtgaaacatggtgagagttccactgtttgaaaggaaagacatcttcttaactagtatttatttttatttttaactattattttaatttcaggggtacaagtgcaggttgaaactgtaatttaataactctcagtcttgagctatttttcggtaaagttgcctatgtgtatcactagcattgatttaatgaagtagtgagaggagaatctgtaaatgcagaagtgaagtaattgaaaatctattagctgagaggttcctgctcatgctatatttagagaacacaattaaaagaaaaaaatggaaaaaaaacaaggaacttttatgtgaaaagacacagagaatgacagtgcacaatagaaagagctgcattaaataaaaataaaaatggaaacatttatccagtgcagcatgatattaaaatattctgaaagagcacgaaaattaattatctactttagttttcctttacaaatgagttagaaatgtcaaacaaatttctggataaatgagaaggctaagcactgaatcatttgcaggtgttttctgaacacagcagagcctggtggattctgacatacatgagaaaagcccccaccaattaaggtgggtttctcatagtcatatgcacttccactattgtggacaatatggtcaagagtaaagaagcccatgttgccctttactttgaaagacaagatgatatgttggaagaaacactaggctgaatccagagacctaattacactttcactcttcatctcagcaactcagagaccaaggcatgtaggatttcagctatggaactagaggactgagatgaaagagttaaacgtattctcctctaaggtcccttccaaactgatcatgctgtagccttgggatatgttgttctcttacagactaaaccacagatacggtcacgttctccatgcttggatctcagggctgagaaggctttgtatatgtttacaattgtaatcactggaaagtttacagggcatggatatcttggaattaaataagcacatggctacttacactaaaaagtttctgtttcattaagtacaaatttttgattagaatacaaggaggtagttcccccaacctttgcaattctatagcctaaaggattaagctaaaatgatcatgtttattattaagcaaccaaaggaaaatgttcccatatggaaatgtgtgatttcttcaagataacatacttgcaacaggattgtaaatgagagagaaaacccactgattgatatatctctgcaataaatattaccattcatctcaagacccactcatttaataaaccttttatgtataagacacttacatttatagattaaatatttatacttagacttttttagtgttttagaagaataatcaaaaggtagaaaatatacatgatttgttaaatataacaagctggcatcctagttctacatttgaaaaaataaaataacctcaatttgggatctgtaatcaatgtgttcatcaaaatgctacaagaataaattatatggataaagatgattggcatatcgcacaccgtaatcctccctcagagattcacacccagcactaacatcctctgagtcaatttatttaacttaaaaaaaactttattgacataatttgctaccataaaagccacccatttaaatagtttctagtatattcacgcactgtcatgtcaccacaatccattttaggtcattttcatcaccccagagagaaaccctataaacattagttgtgactccctatttcccccaaagcctagggactccctctccatccttaggccaccacaaatttttcttgttttgtaaatttgcatattttggacattttatataaattgaatcatacaacatgtggttcctctcatttagcataatgttttccaggatcatcaatgttgtggcatgtatcaatccttcattcctttttattgacaagtaatattacattgtaagaatatactacattttatttacacatttatcagtgatgatggacatttgtgttttttccactttttggctattatgagtaacattgctatgaatattcctgtagaagttctctgtggacatatgctttcattacttttggttatatatctaggagtggaatggctggatcatatggtaactctatgtttaacagtttgaggaaatgctaggctattttccaaagagactgcaccattttacatttcagccagcagtgacgaagccttccatttctttatatccttctcaacacttgtcattgtctttttttattatagtcatcatagtgagtgtaaagtggtatttcaacatggttttaacttgcagttccctaataggggataatgatgctctgtatcatttaatgtgcttattggccatttacataccttctttgtagaaatgtctattcatgttcactggccatattctaaattgggttatttatctttttattatttagttgtagttctatatatacttaacttacaaatctcttatcagacatatgattggcaagtgtttttttccaattctttaggtagtctttcacttttgatggtgtcatttggtgcacaaaggctttttattttgatgaagttcaatttatcaattttttttgtcacttgtgctttggtgtcatatctaagaaatgattgcctaaaccaaggtctctttctctctccttctttctttccttgtctcctttttttttttttttttttttttttttttggagattcattcttgttgtccaggctggagtgcaatggcacaatctgggctcactgcaacctccgcctcccgggttcaagcaattcttctgtctcagcctcccaagtagctgcgattataggcatgcaccaccgtgcccagctattttttttttgtatttttagtagagacagggtttccccatgttggacaggctggtctcgaactcctgacatcaggcgatccacttgctttggcctcccaaagtgctgggattacaggcatcagccaccgtgctcggcctctttctgatttaaaaacataaagatgaggcatggagtaatatcttttccatgagtgaggttgcaacttaagctaacactgaatttagtaataacatttctaacaactactgaaagcttcccttatgaggttggtaaaattattactgtcactttactaatgagtaaactgaagtttagagagggtatataacttgtccaaagacacagagctagtcagtagcggagctagcaagactcaggggtgtctgattctagctgctgtttgtctgccttccaagagagaagcttgagcaataaattatgtaggtttagtttagtggctcaattccttaggtctatttctgttgtttcccttatcctgattgtattatttcttcttcgtttccttgctttgaaaaacttcatggaaattggactctggtgattctgttacatctctgttcttttcagtgtgttgaaacttctgggcatgggtaattgtggtgatagcttgatatctgttaatacccacagatcatgagatgacacctaaaagcactagaaacacaagctattctagaatacctggctcatttcaaaccattttaatgtattctttaatctaagatctattagtctgatcctggttttgcttatcttaggaattggctacacatttagggatgctctaatttaaaaaagatgaatccgagaaaatgtaacctgaaagaagagcctgttaaattactatgtttcctggattaacatagtttatacctgtgccctccaggagctgctaagagtctaccatcatccctacgtggatgtcccaaaatggctgccacaagaaagtaccacaaactgggcggcttaaaacaaaggaaatttatttgctcatagttctggaggccagaagcctaaactcaaagtgttgccagggccatgctccctctgatgcctagaggggaggatccttcttgcctctttcagttctggtagctccaggtatccctcagctggtagatgtgtccctcctatttcttcacaggacattctctgtgtgtctgtctttacgttgtcttccctccttttataaggacaccagtcatattggatcaagggactgccctactccagtgtgacctcatcttaacttggttacatttgccaagaccttatttccaaataacatcatattcacatgtactgggggttaggagtttaatatattttcgggggaaacgatgcaacccataacaccatatctgtatttgttttggggctgaagtgtgattgtttcagaccaatgcctcagagaaatatggaggtgggtggaatcattctactgaaaattagtattttagcatttagaacatatgttctttgtaccacttccttcaaaaaatttatttacatattcatgaggatgtggatattctcatattgaaggtctctacaagatgatgttatgtcaactagtgcagtatgatatgacaacagtaatactgcaatgtggtgaaagtaccaacaactgacaaaatccacagactagctgcaacagtcagagattgattgatgtttgaagcccagctttcagcagcagctgcttcattgagaattggttttagtgactcagcactgcagctgccatttttctctgagccagacaaatcctgacatggacaatgtactgttataggaagtataaattcagctagttatgaatgtcattggcctaaacatgagacttctagtcattctcagattaaaggaaggagataattttgacacttaatgtaaatattaaatttacttatttatttattttagagacgggtttttctctatcaccaggctggagagaagtgatgcgtgatcatagctcactgtaacctcaaactcctgggctcaagcaatgcttctgcttcatcctcccaagtagctgggactacaggtgtgtgccaccatgtccagctaatttttctattttttgtagaggtaaagtctcactatgttgcaggatggactcaagcaatcctcctacctcagcctcccaagtgctgggattacggatatgagccactgttcctggtgtgacattaaatatatttttgtcaattttttttgttgttgtttatttttgttttgtttatagccttcttgcctttaaatttaatttaatgtaatgccttaaagtgaagcatatctaaataattcatcttctaaaggcaaatatataattgtaatgtttagaatttagaatgcctagtaaacgcccctttagggaaaaataaacctttgtaaaaagaatattaatacattttaaaattcaaatttggactttagtgacatcaacagtgtttacatttagctattagtcttccttggactagagtgaatggcagccatgaagtatacagcctgtacagcctaatacagtgaacttatataaatgcttctccagttctagaaagatcatgaattagtaaaattaagcttgtttttgttcttgttgactcatatacctgggttaaaaaaagtttcaaaatgacagcaatgacaaaaaaaataaggttaggctgcattgcttagtaaagataagtaggaaaaccagaagtgaacatttcaacctttgtctattgttgagcaaaatacgaaaccttaatttggccagtttattttgagagattgttcttgcagataatgcttaagagtcactcttcaaagggccctttaaaatggatttattgcaaaattttatttcaaattattttcttagtctaaaattcaaaactaacaatctgcatcttatttagataaaagcatctaaatctgcagcatgttaaatagttagcaaagaaatattcttctgaataagatccttctaatgcatttctctgctgtgtgtgctttttctaggatatagaagaatgaaatagcaatgacaatgttaggacaaagtagactcgggagagagaccttcagctcaaaaaataatgagatcaaaatcacacaggaattcacacagtgttagttttgaaaggaaacagacgttagggaaaggaaaaaagaaagttggttgtaaagtcagtttttaatgaaaaaaaaactgaaaatgcatttgaaattttcatagatattttctggtcctatgcatataactggttatttagaggtaattgttttttgatgaagctgagtttatcctccaccccctaacctgacacctcagtaaaggaatggcctgtgaccttgtgctagtcttttaaccttctaaagcacagtttttccttcggtataaagaatagtcataatagcaacttctgtttattaagcacttactatgtgttaggaattacactaagtacttttcggacattgtctcatttaatcttcacaacatcctgtgaagtggaagttttatttccacagtacaaataaggaaatgtgagccgagtttccccaagtcatatagctattatgttctagagccagtctgtctccaaagctcgtgtgcatagcattatactgtctttaatgttagtcttttccagccttagccttccatgaccaaacctttatgaccatctgacttcctttgcccagtgcactcaccatcgacactgcctctcagccagattcaaacaggttaaccttgcaaaagcccttaaatttccaacaggttacctatgcagaagaagaaactgaagttcaaagggcttattgctttgtaagggctcatttagctaaccaaaatcatgtccgtttaatagcagtatcttgactgactcaaaagggcacaaaaatataatatctacttcaaaaacattttttaaaactggggatatgtgctagttgtgttttgtttttgtttttgtttttgtttttgttttacttctcttccacctctaggagtctatcaagtcactttctggtggatacgcaatatgacaacacatctcttagtagtcttgagctgccctcatgggcgcatttctgtgtgctttttgaaacagaccagactcctttgagcaggttactgatcttatcaaggtagggagtgaacatctggtattaatctataatgctaagagggtatcttatagaaaccattttgaaaaaatatgggatatatcaaaagtgacctctaaagtataattcatcaactttactttcagacaaagtctgaaaagtatatttctttttgttgctcctgtgaatcgacttagtcaaccactactactagtattaagtccatatggcggacagacctggattcatgacttgaccttgcttggcactggttcgattataacctcaagcttccttaggcatccaatggtactaatatttttttttttatggcttttgaaaggattcagtgagagaatgtttaatgcatctagaaagtcatgggcactccacaattgtttgctccctttcctcccagtgagttggtatgttcctttttatatttaacatagttttcattggccttcttctgtgagcacaaatgtttatagatgccagatggaaataatgcgtctatgtatgtaacaatactggggttagacttaacttttttcaatttattttataattaacatcaaaattaactgtgatgcctaacaatttcctctttaacctcagatatacctattaaaatgttgtaagtcggccaggcgccgtggctcacgcctgtaatcccagcactttgggaggccgaggagatcgagaccatcctggctaacacagtgaaaccccgtctctaccaaaaatacaaaaaattagctgggcgtggtggcgggcgcctgtagtcccagctactcaggaggctgaggcaggaggatggcatgaacccgggaggcggagcttgcagtgagccgagatgacgccactgcactccagcctgggggacaaagcaagactgtctcaaaaaaaataaaaatgaaaataaaaataaaagttgtaagtgagatgaaagataatgtaaagcttatgaacttttttgttggtgtttgaggattataatataggtaagaaagtaatataagctaagaagtttaatagttatggaaaaaaattaaaagttacttcttttattgaggctttgcaagcaaacattaagaagcactgaatagtttacaaaaaaaatgtgaatctgctgttttggtgctgtggtttttatgtggcacatggtaaaaaagtaaagagaagctctttccagattgatctgagtggctttcaggttatatttaaatgccaggaattctagaaccacacaggccacacctgaaaagatatacagacagacaggagtgaagcaatggcaattttgtgtgtcgaatgctgtgtcatgaaatgcaacccccaccctctaccctgctcccacttaacatatacacactcttctcttactccaactcaaaataagaaaagaaggtttctttcccctcaagctaatttcttggtgtacagcaatctttgttcagctattctgcaaccatatgtaaaggaaaggtcattttagagcaggttttcacactctgatctacctggagaagtgaaaagtattgtctggtcattaagtaaaaaaatgacagggtttagaatcccaaaatgtgtaccagtattaagagtttaaaagaatactgtatataggattcaaggataacactaaaaacaacagtgaaactgtcttccaaacaattggaaagaccgtggataatgcagtcactatgtgaagagaaaaaggagattcctaaccgatttctcttcaaaggaagagagagggatatcaatttctcatactaagtgaattagtatgatcgacttttatgaaaatgttctggtaaagaaaaatggagtctttcctgatgtcccttaagcagctatactacacattctgcagactaaaactagagagaaaacaatcttcagagaaaaagctaaaatggtgtgttttgtcaatatgaagtggacagtggaatacaaaacagaaatcttcggtctgacttctccctaaaaaatgtcctcctggttggatcaaccaagccaggtggggaagaagaaccgttggagggcctagtataacattgcctgaatgttctggaatgctgatgaccttccaggaatattagcacatctcacaagtgatacagactcccaaactctttcttcttatatataacagttggcttctatgttgccaactttattaacttcaaagcttaatgtgaaatttaaatcaccatatcttccaatgaaacaataaaaattgaggaggaggatttgtttcaatttgccatttctacttacagacatcagcccctggctgggtgcgttggctcactcctgttatcccaaaactttaggagactaaggtgggaggattgcttaaggccaagagtttgagaccagcctggaaaatatattgagaccccattcctattaaaaaaacaaaacaaaacaaaaacaatcagcctcctagaaagaatatgtgagtagaaaggcacttatgcttcattttcccttcattcttgtcacctcttttcttcctctattgtgagaatttaaaaaggacagaatgtcataggtatctgttgggtgtttttttttctcttggaattctggaaatttaaactaaagaaattattgagatctggcttgttcagaactgtaattaatgcctttctatttcaagaaatgattgcttcagttttttttgggagctttaaatggatttaagacatttagcccacattagattccctttaaatttgtttgtcagcttgaatcaaggttaattctattattccatggttttaatcattaaccctttcctatgtaggataataacattcttttttttttaacctttgctgattactgctgctctcttctgccttttgtgagaataccccatcattcagcttttggcattctctgatcttagtcttagattctattaattttcacattttcatctgtatatactatacaaaattgctgacatttctattttcaaatttttccttttgtctgagttccaggcccatactttcagctcccgccttggctgttttccaccatctgaactccacccatctccctctcacctgttattttgttggtggttccagtattgtcctagttccctgggcataaaaccttgaaattgtttgagttcatcattctccctcattcggtgtagcctatcaccacattccatggatttttccattttgtaaattctttttatgtccatatatattagtttccgacatcagtttggcagttattgcaaaatccaaaaatgacagtggatgaaacgcaatgtaagtttagttctatcttatgtgcaatccaggcaggtgctatagggctggtatagtggcttaaccaggttagggatgcaggccccttctatctagttgctttgtcatctccaaggtattgtgtttgtccacctcatgaagcatgactcgcagcaacagatgcagtccagttttcagaaagggcaaaagaggaatgagagaccacattcccttctctttcagtatgtaacctggaagtggagtatatcacttctgcacctagccatatttaatgaagaaatccagttgcatgacctagcagcatggaaagcttggtaatactatctgtggctgtgtacccagctaaactttctatttctatagaaagggggagaggagcaaatagcagccagccagcagtattccctacactcgtcttcctccagttttatagtctgcaccctttggtgggcccttattgcccattgccaaggctatttctaaaaacttttgctggatttgctatttgcttactaccaatccacccatcacccattctttcttataaggaatcacatgtttttgttgttgttgttgttgttgttgttgttaaacctcatcagacctttgctcagtggcccacagcatgaagtctctgtttcaatattctttataatctggtcctagtatacctgttgccagccatctttcaacttttattatttcattaatttattcatttagtatatgtatgttgagtacttactatgtgtcaggcagagtcattcattctcctaagctagttcatttgagttggtggacagaaaacatcctcatgaatgcacatcattttcaatgtcaccatgattcatctctgtgatgattgtgttcaccattgtagtgcttgagaggttaaatgcatcctcttaagagtagacttttaaaactaggtcttacagttgaagtggttaacttgcttcacatagtcagatgatgttcagtggatacattttaactttcagggttttatgtattttagaactatgccttgcttttaaaaacaaaacaaaaatttaaaagaatacttattgaagaggccaggcgcggtggctcacgcctgtaatcccagcactttgggaggccgaggtgggcggatcacgaggtcaggagatagagaccatcctggccaacatggtgaaaccctgtctctactaaaaatacaaaaattagctgggtgtggtggtgggcacctgtaatcccagctacttgggaggctgaggcaggagaatggcttgaacccaggaggcggaggttgcagtgagccaaaattgcgccactgcactccagcctggtgacagagaaagactctgtctcaaaaaaaaaaaaaaatacttattgaagtatctataactagatttagtagctcattgacattgtaaaatagttcaaatgaaagcataggttaggtcttatctcgtgttacagttgtctagttgcttatttgttcccaagcaacctcacctgatccccagtcttacagactgaagtgtaaaagcctttaccggaacatgcctttgactgaactttgtcctccaaactacatttccttctccttctacagtccttggtgttttgaggcagaaatttgcataatgtaactaacctgacatgatttttatgtttacaattcatttttcagagaagtcactgaaccaggtgagatacatgaggctgacttatacaagttcagggttaaatctgtatttaaaactttgatattttgttcatcatagatctttgcataaatttctatttttacagtgtatggcatttacatgttatttatcttgatttctgagcttttgggcaccccctgaaattttgtgcttcagacctgatagattcttctcctttatgcatgttatttgcatgttaacatggctggctgcttgagtaattaaaactcaagttagaaaatatatatttggaagaaaaaataagtatttattgttttaccaaaccctagtaccaaaaattaccttaattcctgttagttaatggtttaagtatttatatttacaactgaggtcagcttgggacatgcagagaaatcagttcctgcaagcaaatactgattgtccatcaaaaaggaggatggacaagcaccaagatgaatatttttagctacattattatatctttcttgaaaaggctgctcttgttccatctccagcctggtagcctcatctctaaagtggcagtgtagacatgtagttttccctgagaaggaggagaagagtagggaagggagtgagtagagcatcagaccttgaagcccgaggtacccagagcagttctgcttgcatccatcttgagtgtaggccttctgctaaggggttcatttaaaaagaaaatattcctcatctaaaaacaatagtttgaaaatgattgaactaaatgacattcaacatctctgctaattctgaatgtgcatgtgtttctactgtgataaatttctgctgattcacccatactttgatctgttccctttgtaaagggtatcaatacaccttgatgagtccactggctttttggctgttgatatgtcttagcttccatgtatatcaccaagttttctcttgatttagttgtagtttcaggagagagaatggagaaagaatcagacctcgtgtggtagaaacatgcaaattctgcatcgtacactgaggatcatgaaaaaatattagaacatctaattatatctatttatattttatttttaatgtctgttaatgtatttaacatatataataataatatagcaaataagttatattagactattaggatagtaatacttataatttatagtataaatattcatatataggagatatgtacacacaaaaattatttttatatttgttaggggcgtgctactgttcttgaaatcttcccaagaattactgcactttcattagtaaaatatttgataagtgatattttaaaggatgagtagagactctcacagtctcaacctttagtatttttgtgttaagcatatcttcattaaatctgaatttttatgtacattagtaataaaaaacatggatgaaatattttcaaagtccaccacataggtatatttgtttgtaaaataaactggaaagaagtggagagggaaaaacataactatttcactcatttttttttattttggttgtgttgcaatagacaaggataggtggatttctgtaaaaaaaattaatcatggaaaggttataaaattatagggatattttaaacatgcatttttaaaatgcaaatagcaatgtttacttttatctaacagactttaaactagattcttatttatagtttctactagatctttgccaagagctgcatccaaatggttgaaaatattaagactacaaaattttgttttcttaatcatgtcttttaggtgtgtatatttacattacattatataagttttgaagtttacaaatttttatctttttgctacttactgtatcatcatttcttcatttatttctcacttcctcttctcagttccttttatttggtctggacatataggactcattgaaggaaaaagtcccagacaaagagtgagaggaagagcaaagatcatttgagaaactgagtatgggaacaaggttaaaatgatgtctgcttttaattttaaaattcttccaaggtggtaaaatacgcattcaggcagctccaagtctgaaaaacacctaatgcaccttgacattcaacaggtatttattgcactcctcctaccatctgtgaaacactgtgctgggaacaagacaaatgagtcacagtccatgccctcaaaaggcttaaaaaaatgtgtttgcagcagaaaagcagacactaaactgaaatgtgtaatgcctgtgataagcacaaagacagatctataccagagtgttttagagcacataggaaggaacctgcctagactaaggaagacatagaaggctctggaaagggttgcccaagttgacccagaagagatgaagaagatatactagcaaggagatggggaagagatggagggcaaagaaactcagccacaggggtgacagaaataaagcacaggattctactggtggagtgtgactgcagagttttaggattggtggaggttgggcatgggtgaaaaggaaggaaaagtggagtggggctagttcttggagggcaccatgtaccacgtgaagggatttgggcttgatattgtaggtgataggcaaactaataagggttaattgtagaatgatcatgactatatttactttgaaataattctacctgacacctgtgtaaagaatggatttgcaggaagcaagaatgcatacaagaaaatcattaggacgttgttgccacagtccaggaagagtgaatggtaggttgaactaaggcagtgagagtgtggtgaagggaatttgcaaagtgccttattgctatgagtggctaatgtgcataccgacggttcatactcccattatttttcacccttcttatgccagatgctaagtcctgaaatataaggcccattctgtgaataggaataatatataggtagtttactttgatttccaagagcaagatggttcgattcctttgacatgatccttatgtgggtactggtaatattggtacaatgccttagaatacttatggagggtgcagaagattctctacaattatattctcaaagtctggtgtgtttctacaaacttccaaaggtggtatcatgccaaatattgtcctacaatcatttttatgtggctacaaatatttcctgtaatgatcagttgtttttacacgatgatttctcaacctggcaatgatccttaacagcatcaatgcagcaatcatccactggattttgtagctgataatcttgggaactaataactgttatttgaaataagatccttttgacttttaatagaaaattttatgtttgaattagaggttcggcttttcccgagaaagtcaggcaagtcatgatgtttaccagttttagctaaatattttaaaaagccaaaagtaattaaaatttgattaactggattgccaccttttctggttcttcatagtttttttttttaatttgcaggaaagaaagtttatcagaattttttaaacctgtctcagaaataacaacatattttaatcagagatttgtaagtatccttttcttctttatttaggaaattatatgttgattttgtgaaagaaatggttcctaccataaaacacttgacaggaaatggatatttagtctgaagtggcatgcaaaatttgaatgagagtaatacatatgcaaaaatctaccactcctcaaacaacaaaataaataaaccaaagcctcaattagaaaaccttcaccaagtctatctatagctcataaatatttggtttattctttggacatttctctttgatgatgtctttttcattatcgtttttccttttgtgaagatacatgtgtgtctacatattttagagagtttgtcacatcaatgagaaggaagagaaaaagaggtccacaggaaagggaagaaatagtattctgttaaaagttaatatggcttttctatgaccacttttggtgaattttttttaaaaatcaaaactaggtctcataatactaaggtccatgcagtttcatcatagttctgaaaggcctattattgtcctatacccaaaactgatcaactcacgaatgaggaatctaggagactttttctattttaatttaccagagttcaagacaagcacacattttcacaaacaaatattttattagataaatttagaagaaactgtaagtgaaaaaaaattatgtttttttccctgaaaaaaaatcatgtctaatgaagttttattatagcactaaagcaaataatcagcatattgaatttaagaacacagagttgatggtgtaaagcagcagtccctgaccatttttggcaccagggactggtttcatggaagacaatttttccacagacttggggttggaggggataagggacggttttgggatgattcaatcacattacatttattgcacatgttatttatattattattacattgtaatatataatgaaataattatacaattcatcacaatgtagaatcaatgggagcgctgagcttgttttcctgcaactagatggtcctatctggggtgatgggaaacagtgacagatcatcaggcattagattctcataaggagcatacaacctagatccctcacatacacagttcacagtagggcttatgctcctatgggaatctaatgctgccactgatctgacaggaggcagagctcaagtggtaatgtgagtgatgtggagtggctgtaaatacagatgaagctttgcttgctcacctgttgctcacctcccgctgtgtggcccagttcctaacaggccatggattggtacccagcccatggcccaagtgtaaagaagatcagtaaagcaaagtcatgcaactaaagtctggagctgagtgggctcttcaatagctgtgtgagaccttggacagcataattctggggttctcaactataaatatttgtgtttgagggttgactaaaatgatgactaccctagatcattttatgattccaggatatcactgaaacattgctgcttagtagttaacagtcactttatcttggttaactattattattatatgacattaacatttgtgtagtagctaataaaactgaccaacaggaactgagatatatttctatcttgcttcatcagataagacctcagcaattgtttaatgaaaaggtgcattaaatgtttaattacacattttgcggcaatataggctgtttcatagctttgtggcattagttttcagtttcattgcatacatttattaatcttgtgattccaggtaagttgcctgaacttcctaacacttcagtttgtaaatattaacaatgacattaacctatactgtacccgtgatttcctgtctttactacattgttttatagatcttgaggttttgtccttgtaaagatttcatttgtaagcatatatatgctatgttatggatgatattggtatttgtaaagtcactggaagaattgctataatgcagattcttggccacacttccaactattaacaagtatcttaggtaactcttatgaaagtaattcataagctagtctttgagaaatacaaattttcctttaaaaatgatccccaaatcaaaatcgaaggggagctttgtaaaaaatacacatttctagggctctatcttggagctcctgatttagcagcagggctgaagcaaggccttggaacttgttttttttgtttatttgttttttgttttttttaaaactgcctcattgattataatactttgaaaattcctgctttacagcctcactgcatcgctaacttttggttgaagaaagttttggctgtgctgcttaccatatatggatgaggggttgtagtcagacttgtgtgcttctgctagtgcagatcaagtaaagaatgaaaatgatgagtttggattgtctgcagtgcatacattgagattgactgtcttctcacccttggctatgtagctgctttaagtaaatccatatgtcaagcccataaatttcagatttcctgaaccagagaagactgttggagatgatctagttcaaaccccttattttgcagaggagggaattaaactcagagatttgccccaaggcccccggagaagaccaggactaacagttggattcttgccccaagcttagtttcatttctgtcacaattgaatgactctaattctgccattttaggaacctatgcaacttgtgaaaccagctttcttttcttccttccttccttccttccttccttccttccttccttccttccttcctttctttctttctttcctctttctttttttgtttgaaatggagtctcgctctgtcgcccaggctggagtgcagtggcgagatctcggctcactgcaagctctgcctcctgggttcatgccattctcctgcctctgcctccctagtagctgggactacaggcacccaccaccatgcccggctaattttttgtagagacggggtttcaccgtgttagccagggtggtctcgatctactgacctcataatctgctcacctcggcctcccaaagtgctgggattacaggcatgagcaaaaccagcttttctagtgctgacttcaggcttccagagcaggcatagaaagtgctcttaactgtccagctctatgaaagtgagagcatcttccttcccaattccagttctctgtcctgaatgaaaagaggcaggagggccactgagggattgctcatactcacctggacaggacttctgttcctatagttgcaccattttctctattgccttcttggtctttatgttagccagagccaggccttttcttaaattctgtatctccagaaggcagagccatcatcttagtttgtttcttttttttaatagttgcatctttctgttttgttttgttttgtttttttgtggcacatctttacttgccctaatttggacatttttcagctctggagtgcaattaagttcaacaaatactcagtgcttctctgtccgaagagcagtcctgggtaccagagatgtaaaatgaatccagtatagtcctagtttcaaaagcattcacaacatcatgagaaatgagataagtatgaaaattgttgcaggaatgtttgcaagtgccacaggagcacagaagccatgacttccacttactaggagagtcaaagaagtctttggagaggaggtgacattggtctgttttaggtgcaaaaccataacccacaatataaatgtacaacattttgaaaccacatgaaaatagtgtatctaagtcttaataaagagagcaaatgcaatgcagataaataaggctggtgtcagcatgatggaggaagagggacactgcaacacgtggcgggaggcctgtgtcttctcacaccactgcctccaacttgtgtgactctcagcaatccagtcagacttctgtggctacaggcaatcctacatacttgggataccatcaagtgaaaaaaaagtgcatcccaaacaaggtgttatgtgtgccaaaacttcagttttgagtagttgttgcccaagtgaagagaagccttggaggaagagcacttcagccaggaggaagcacaaacgtgcagtgacctgtgtttggaggtgaaagggagtatgtctgagagttataagtcctgaatggagggtagtttatttcaactgctggactggaggggagcagaggagcagcaagagagaagcctgggaagtaagcagagtgtattttgtgaagtgtgttaaaggtcatgttaagaaattgggtgagcttttcctgatgtaaggggatggctgaagagctgagatggtaagatttgctgggctgttgtcaagaatggatgagagggcaaaaaccgaggcaggaaactcagtgaagaggaccatctaagctagagaggctggtgatcttgggtagtgaaagaggatgagaaaagcagtccatccacagatttaaaacctatttagagactagagtttatatgacttgatcatggagggtgagggaaaaggatgcctcctgggtttctggggtggatgtacagtggtgttcacttgcaggaaaatccaggaggaggaacaggtttcaaaaggaaggtgatatttctaagccacggtgatgagatcagctgatttgtcctggggctcttcaatattaactggccttccacatgctgagagaatcacgtacattgtcacacttcatcatctcagttgtgagaggtattcttttgtgaactccaaagaagtggaagctgaggcttcgagagcttaagtgccttgtataaggtcccttagataataggtagaggagccaaaagttcagaacagattctaaaccaaaccacatgtaccttctattatagcactctgctttcttttttcctttgacacatataattctgtaaaaataggtcaattgtagaacacaaataacttgggactttatggattgttaaatagaacacataaactctactttctatagaaggtttgctgaaaaatcaattcacaaaggctgattaattggagaaaaggcatacaaatctatttaacatgaatacataggagccttcagaatgaagaccccaaaatacaggggcaattttccatttttacgcttaggttcaaaaaagtatggattgccatatagaaatatgattagacaaaattgatattatctcatgctaatagtctgactggggaaacccagcaaggtctgtcggtctagattcttctgggcttctctaagcatggattctttccttctggatttgggggaggaccctctctgaaatggaggggttcttcagacctatggttgaatgagttagataatttctttatggccagtttttagacagaaagggagagggaagattagagtcatatttttaggtttcatggtgggctttgggaaaagagggattctgatttctgcgacctgccttggggaagagggattctagtttttatgacaagcctcaggggagaatgggactgccagacaggaaggcaggccaagatcaaagaaaaacttttgcttctgaggctgcttctgaagttttcactttgaggtattgcttactgagctccaacatgtctgagttaccaccatccctcagttgaaatactgcaattgcctcctaactcatctcttgaaccaacttttcctcttttccaatctattccgtttgctgtagccaaaacgaactttttaaaattcagttttgattgtcatactattacttaaaatccttcaatgacctcctgttactattaggatagaataaattcttaatatgtctaaatgttgtggcccctactaactgaccgacttcatcttgtgtctatctttcccttcttccctttgctgtggccacactgaccttccttcagttcctaaaatgtgctcgtctctcctgcatgaaatactcttttcctacctcaataccagttaactacatttcttcctttatatctcagttcatactatcaatgagccaggtcctgacacattcacataaaaccttgtaattttttttttatctaagacttaccacattttggaattatatatggatttgtgttaatagtttttataatgttttttctcatccattggagttctttaaaacaattataaaactgtttgggcaggcatataattggcactcaacagatatttttcaaatgaattaatacattcataagtgaataaaaatgactttggattagctaatttatatttgatcatttggtaaattactttttagaattcagaaaaaggacatttcttttacacctataaaataaactgagttttgctcatatacaatattgttttattatactccaatgatataacatttcccctggtattatattgtaattgcatttctccttctgaagtcaattttcttttgctcaataaatgaagatgattcaaacagcagaggggtaattacctaattgacattttttggattaaccaattaagaaaaaacaaaacttggaaatggcaactataaagatcaatatgtcaccattcagtgtaccaaggaaagagaaaaatatgtcataatttactttaaatgtcacagctttattgcacttgctaattaaatgatgcttttccatcccagccacattgaaaatgatttagaattttaggagtgatatttaattgttccctcaagaatgattttctaccatgtgactgtgcaccatgtaactaatgaggcttggatatggcttaagaaagcatgcgctaatgtgtcagcctacagccctcaagtggtgatgtgctatcagtgctcaatattcgttccagaactcaggactgaacaactgattgaactgtgggatggagtctagcgtgagaaatttctacatcctattttccagttatactgctgtggccctctgggattgtctactgcatgtagacaatcacagttatctagcctttcaatatctatgaaccacctcagagaaatagattagataaacactaacttttttttttttagctcgaatagtctataattctaaatggaagaagtggggagttacagataggtggaggaaggcttatgagttagagagtaaaattatacttgttacaagacacagttttgtcaggcggctggccagtagggccatgatttatgatacaattgaatgtttgccaacatgggggtcctggtctcctaggattctatagaattattagaggagtccacaaagccatgtgtctgtgtctaaatactgtcacattaatgctaccattatctaaatgtacatagattattttataaaaaataatttatttaaagtatttaattcacaaaaatgcttttttgttacatatattctgaatcaatggattatctaaaaactgtaggttttttcaacttgaggggttattttggcataaaacctcaataaatatagttgtaacttttatacctcaggatgtgccatattttttagtattacccatacagagtgtttctgacaaccctcagattctattaatctatcctgggtgctgcccatcacctctcgtctgctgctctggtctctctgctctcttccaaagagagacttctgctgtcttccaaagcttcttgagcctgctacagttctctctggtccacgtcctcctgggattgttctcagcaattttactttactgtccaaagcaaagacatcactaggatgattatggtgcatagtaaactttaccaagccctgaggataacatgagagaattatagtgcagaaatgggaaacctggaattggttattcaacatcattactagagttcattggttgggcccattcacaagggtccccggttgattggccctttccttactttgtaacctgtttcaggtgtctgctcatctcccacaggcaaggttgatttaattatgtgctgcctccctggaatcgagtcaataattctctctgcacataaatcagtacacattatgattattaaaatttggcagttatggaattcagagcctgtattgggctgttcttacattgctataaatacctgagaatggataatttattaaaaagatttaattggctcatggttctacagactgtacaggaagcatggtgctggcatctacttggcttctaaagaggcctcaggaatcttccaatcatggtagaaggcaaagggggaacagtcatgtcacatggcaaaaggaggagcaagtgagagagttggaggggtaggtgccacactcctaaattaccagatcttgagggaattcactattaggaagagagtaccaagccataaggaattcaccccccatgatccaaacaccttccaccaggccctgcttctagcattgaggattacaattcagcagagatttgggtggggacaaatatccaaattacatcagacgtcaatgagtacaactttgaaatcacatcaataaggaacttttatcattcagaatattattgttccaaagtggagttctcatttaaccaagtctcctctaccccaacaatctactcccaagcaagatggctttaccaatgtagtaaatcagttttttcgtaaagccttaaaagaacacagactgacttctaagcaagactcaagggcaagaaatgtacatgtctttccctaatagaccttacaatcagaaactttcccctaaactaacaataaggctatgatatgatccagccatcacacttctggatatttattccaaagaatttaaatcaggatattaaagagatattagcactcccatgttcattacagcactattcacagcagtcaaaatgtgaaaacacttaattgttcaccaataggtgattggaaaaagaaaatgtggtatatttataccttcaaaaagaagacaattctattaagtatgacaacgtggataaactttgaggtgaaataagccagtcacagaaagacaaatgctgcatgagctcacttacatgaagcactttaaataatcagatttgtagaagccaagagtggaatgatggtggttgccaggagattgcagaacaaggaaatggggagttactaatcaataggcataaagtttcagtaaaccaaaatgagtaagctctacagatctgctgtacaacattgtaccttagtcaacaatacagtattctacacttaaaaatttgttaagcacctagatctcatgttaagtgttatttttatcacaataaaataaaaattgggaggaaaaaaacactttcccctaagcacaataaagacctagccctcaatctacctttctctttcacatctacctttctctttcacatctcccccaaacagaggctgggccttttacctttacaaatcacaccaccatgtccactagtaatctgatgttagaaactgatgtttattcttgaaaaaaattatagaaaccaccattatcttataagtttgccctagaagtccagtgacatgagctttagactggattttcaaattaatcagatgattagtcataccagcaatctggtctcctatatacatctttgaaaatagaccggcttttttgtttttagttttgttttgtttattaatgagctgatgattaaaatttcttctagctccaaaattctcagatatctacaaattacacattgattgtcacttgttttgttttcctcttgactgcctttaatagcattgattaatttggctttgcatcaattctcttaagttgtaaaataagaaaaataaactggataaggtatgctttggtcaaggtcagatacacatgtgagtctcttatgtaaaatgtacattgcaatcttaaaaattagtctattgaaacatttctataaattttttaaattgagaaaacacatttattaattttcttccagctgctaaacttctcagattattgaaaatgtgttatgaaaagttagtcacttgcccccggtcatagacagtgatagaattaggaactggatcctatcactatctttaatttaagaaatgagatcatcatgaattaaagggggagattgtgccaaagtgtaggtaataccaaaaagctgcagttttaaaaagactaaaaattctattggcatttataattactacagtgtatataagcaatagagataagaatgacccaatttgtatttcccagataaatctcaaggcaagttttaaaaagaattaaaagaaagagaagaatcttaggttcaaatgagtttacatcatgcataaacacagcagcaaaatgcccattctatttggcctcagttggacaactgcctataaaaaaagaaatactcaaggaaaatttctgctgtaactgggctagctttttaaaattaattaattaattagtttttattggctttttatttttaatttttgtgggtacatagtaggtgtatatatttatggagaacatgagatattttgatacaggcatgcatcagggtaaatggggcatccattacctcaaacatttatcctttgtgttaaaaacaatctgattacactcttttagtttagaatataaaattaaattattattgactatagtcatcctgttgtgctatcaaatactaggtcttattctttctatatttttttgtacccattaaccatcctttactaccatcccaccactaacccatgatccccttcccagcctctggtaaccatccatctgctctctgtctccgtgaattcaattgttttaattttagctcccacaaataactgagaacatgcaaagtttgtctttctgtgcctggcttatttcaattaacataatgtcttccaattccatccatgttgttgcaaacgacagtatctcattctttttatggctgaatagtactccattgtgtataggtatcacattttctttatccattcatcttctgatgaacacttaagttgttccaaatcctagctattgtgaataatgctgcagtcaacatggaagtgcagacctctttgatatattgatttcctttctttgaagtatgtacattgcagtaggattgctagatcatatggtagctctgttttaattttttgaggaaacttcaaagtgttctccacagtgattgtacaaatttacattcccaccaacagtatatgagggttcccttttcttctcatcctcaccagcatttgttattgtctctctttttaataatagctattttaactggagtaggatggtatctcattggtttctatttgcatttctctgatagacgaatgatatggagcaccatttcttatacctgtttgccatttgtatgtcttcttttgagaaatattttttttcaaatcttttgcccatttatatatatatatattttttatttttcgagaaaggatctcactctttcatccaggcctgagtgcagtggcatgatcatggctcgctgcagccttaacttcctaggctcaagcagtccccccacctcgcctcccaaagagctggggcaacaggcaggtgtcaccatgtccagataacttctttaatttctgtaaagatggagtcccagtagattgtcttttgaactcctgtgcagaagtgattctcctgcctcagcctcccaaagtgctgggattacaggtgtgaggcaccacatccagccttttttgcccatttttaatctaattattaattttttcctataaagttgtttgagatccttatatattttaattattaatctcttgtcacattggtactttgtaaatattttatccctttccatgagttctctcttcaccttgttgattgtttcctttcctgtgaagaagctttttaacctgatgtgatcccatctgtccatttttgctttgggtgcctgtgcttgtgagttattactcaagaaatctttgcccatttcagtatcctggagagttttctcaatgttttcctttagtagtttcatagtttgaagtcttaaatttaagtctttaattcattttggtttgatttttgtgtatggcaagagacaggggtctagtttcactcttctgcatatggatatccagttttcctagtaccatttattgaagagactatcttttccttagtatatgttcttggcacctttgttgaaaatgagtttactgtagatgtatagatttgtttctgggtactttattctattccattggtctatatgtctgtttttatgctagtagcctgctgttttgcttactgtagctctgtagtataatttgaagtcaggtcatgtgattcctcttgttttgctatttttgcttaggatagctttggctattattctggtcttttgtggttccgtataaattttaggatagttttttctatttctgtgaagaatgtcattgatattttcatagggactgtatttaatctgtagattgctttgggtaatatggacgttttaacattattgattcttccaatccacgaacatggaatatcttatcattttttgtgtcctctttaatttcttttgtcagggttttagtttttattgtagagatatttcacttctttggttaattcctagatattttaattttagctatggtaaatgaaattacttttttgatttctttttcagattattaaatcttggcataaagaaatgttactgatttttgaatgttgattttgcatcctgatattctactgagtttatcagttctaatactttttggtggagtctttagatttttctaaatataagatcatatcatctgcacacaagagtaatttgacttctttctttccaatttggatgtccttttttttttaaattttatttaatggctctagctaggacttccagtactatgttgaataacagtagtgaaagttgatatccttattatattccagatcttagaggaaaggctttcagtttttccccattcagtgtaatgctagctgtgggtgtgttacatatggcttttcttatgttgaggtatgtttcttttgtatctgtttttcgagggtttttatcatgaaaggatgttgaattttatcaaatgctttttcagcatcaattgaaatgatcatatgtttttttgtccttcattctgttaatataatgtatcacactgattgatttgtgtatgttgaaccatactctcatcccagggataaatcccagttggtcatgatgaatgaaacttttagtgaagagttgaattggtttgctagtgttttgttgaagatttttggattgatattctttagggatattggtgtgtatttttctctttcggatgtgtctttgtctggttttggaatcagggtaatattggcattatgggatgaatttgacagtattcttttcttctgttttttttggaatactttgagtaggactggtattagttcttctttaaatgtttggtagaatttagcagtgaagccattgggtctcaggctttactttactgggagactttttattatggcttcagtcttgttacttgttattggtctgttcaggttttgtatttcttcatggttcaatcttgatagattgtatgatagattgcatgtctagaaatttatccatttcttctagattttccaatttattccatatagttacttatagtagccactaatgagcctttcttttttttttttttttgagacagagtcttgctctgtcgcccaggctggagtgcagtggcgcgatctcggctcactgcaagctccgcctcccgggttcacgccattctcctgcctcagcctcccgagtggctgggactacagacgcccgccaccacgcccgtctaatttttttttatttttagtagagacggggtttcaccatgttagccaggatggtcttgatctcctgacctcgtgacccgcccacctcggcctcccaaagtgctgggattacaggcgtgagccaccacacctggccgatcctttcaatttctctggtattggttgtaacatctcctttttcatctctaattctatttatttgggtcttctctctttttttcttagtctggctaaaggtttgtcaattttggttatttttctaaaaaccgaattttcgttttattgatcctttgtgttatttcttcatttcaattccatttacttctgctctgatgtttatttcttttcttctactaattgtgggttcagttttctcttgcttttctagttctttaatatgcatcattgagttgatcacttgaaattttattcttttttgatgtaggtgcttattgctattaacttccctcttagtactgtttttgtgaattccacaggttttggtatgttgtgtttccattatcattcgtttcaagaaatttttcaatttccttcttaatttctccattgatctactggtcatttaggagcatattgtttaatttccatgtgtttgtataggttccaaaattcctcctgatttctagttttattccatggtagtcagagaagatgcttgatattatttcaatttttaaaatgttttaagacttgttctgtggtctaacatatggtctattcttgagaatgtgcagtatgttgaggagaaaaatgtgtattctgcagctgttggataaaatgttctgtaaatatttatcaggttcacttggtctataatgcagattaagtccaatgtttctttgttgattttctgtctagcagatctgtccagtgctgcaagtgggatgttgaagtctccagctattattatgttgggagtctatctctctctccagctctaataatatttgctttatatatctagatgctctagtgttggatgcatatatatttaaaattgttatatcctcttgcttaatagacccctttatcattatatgacctttgtttcttcctatagtttttgtcttgaagtacattttttttgatataagtatagttactcctgctcttttttgacttccattagcatggaatatctttctccatctttattttctgtctgtgtgtgtctttgtaggtgaagtgtgtttcttataggcaacagatcattgggtctttctttttttttttaatccattcaaccactctgtgtctttttattggagaatttagtccatttacattcaatgttactattgataggtaaggactactcttgccatttagttgttttctagttgttttgtggtcttttctcctttcctgcgttccttttagtgaagatgattttctctggtggcatagtttaatttcttaccttctatttttttgtgtatttgttgtatgttttttgatttcaggttaccatgaggattgcaaatactatctcataacccgttatgttaaactgatgacagcctaacactaattgcataaacaaacaaacaagcaaaaagaaatctaataaaaactctatactttaacttcctctccctgcttttttaagtttttgatgtttctatttatatcttactatactgtctatgtcttgaaaggttgtctcagttattatttttgattggttcaccttttagtctttctacttaatataacagtaatttacacaccacaatttcagtgttataatatgctgtatttttctgcgtgcttattagtaacagtgagttttgtaccttcaggtgatttcttcttgctcattaacatttctttttctttctgattgaagaactccctttagtatttcttgtaagacaggtctggtgttgatgaaatccttcagcttttgtttgtctggaaatgtccttatttctccttcatgcttgaaggatatatatatatatatatttttttttttttttgccaaatatactattctagggtaaaaggtttttttcctttagccctttaaatatggcatgccactctctcccggccctaaattttccactgaaaaccctgctgccagacatattggtgctccattatatgttatttgtttcttttctcttactgcttttagggttctttctttatccttgacctttgggagtttgattattaaatgccttaaggtagtctcctttcagttaaatattcttgatattctataaccttcctgtacttagatattgatatttttgtttaggtttgagaaattttcattatctttttgaataaactttctacccctgtatctttctctacctactctttaaggccaataactcttagatttgcctttttgagggtattttctagatcttgtatgagtgctttattcctttttattctttttgcttttgtctgctctgactgtattttcagataacttgtcttcaaggtcactaattctttctctgctgtatcaattctgctattaagagactctgatgccttcttcagtatgtcaattttatttttcacctccagaatttctgcttgattcttcttaattatttcaatctctttgttacatttaaccgatagaattctgaattgcttccctgtgttatcttgattttttttttaactttcctcaaaacagctaatttgaattctctgtctgaaaggtcacatatctctttttccccaggattggtccctggtagcttatttagttcatttggtgaggccatgttttcctgaatgtttttgatgcttgtggatgttcattggtgtttgggccttgaagagttaggtatttactgtagtcgtctcagtctgggcttgtttttacttatccttcttgggaagccttttcaggtatttgaaaggatttgggtattgtgatctaaggcatatctgcattacagggtaccccaagcccagtaacactgtggttcttgtaggcttgtagaggtaccacattagtgatgttcaataagatccagaagaatactctgtattaccaggcagagactcttgctctcttgctttactttctcccaaacaaacagagtctccctgtctgtgctgagctgcctggagctggaagaagggtgacacaagcacccctgtgaccaccagtgctgggactgctctgggtcagatctgaagccagcattgcattgagtcttgcccaaggcccgctgtaaccatcccctgtctatagcctatgtttgctcaaggccctagggctctacgatcagccagtagcaaagccagtcagacctgtgtcctcccttcagggcagtgaattccctggcacattgagtgaattcagagatgtcaaatgggagccaggaactggagtcaaaacctcaggaatctgtctgttgctctattctactacagctaagctggcactcagaccatgagacaaagtccttcccaccttcccctcctttccacagccagaggaatctctctctgtggccaccaccacagccccatggggagtacttccaggccattgcttattttcactacttgcctaaagctcttcagtcagcttgtggtgaatgcttccaggcttgcgactcacccttcagggcagtgggctcccatctggcccatggcaggtccagaaatgccatccaagagccaaggcctagaattggggcctcacaaggctggttggtgctctaccccactgtggttgagctggtacctgatttttggttcttataaaggtgtagatagttgttaaattaaattgttgtttctgtcagggggacaataggtagaggcttctattcagccatcaagatctatccctcatctgggctaccttattttagattaaaaatacatcaaagaaacattatgtttcagactacataaagccttctgatttataagttactaggaaacaagttttgaattttaatcttggcaattagcaatactttaaattataaagactattcaagttaagagaaggtaggcacctctgctttctctccacgttccatagaggatttgctgaggataaaggacttgcatttacatgcaagtacataaaaacaagacaagaaccaatgcatatctgcattgttttttaagatttccacaactgtaattggggcttctgaaaatgtagaacattctatcctctgtaccctgtgacgtataattaatttcagggtccagcagaccccagaacacaaggcttcaaggttttctgaaacttcagtactctagggtgtagtacgtagcttggaagttagagtcaactaactgttgactttcaatgtttccatacttcctttactccccaccgccccctgctagtgagaatatttaaaattatctttaattatactaatttgcaaattatgacaagctgagtcagctttttagtattttcttcagctatttgaattatgatagatttgtgggaattttctcatactaaaattcttcagcatccttaatcaaatgtcaaaggacaatatttgaaagatctgatgtggaatgaacaaactggcaggatgacttgaaaggtttttcttggttcagacatgctgcctaatatataaatatgacaatacttaaaatgccaacagaacacttttatgaagtttgataacatacactttctctccccatagacaggatctgcaaatgatgtggactacacagtgtcagatcaatgttaagttcacttggaaagcactcaatgaatattttctatctactttccacccttagaatctgttcttgcctctcgggagattttagtcttctggggaaaaaccattacccacagagaatgtttagtgaacatcatattaaactgatttagtggtgaacttcagggttgattatcagagtgaaaagtaaaaaactctaggagatgactgatctagacaaggccatcagcatatatcctgacagggcaggtattgagaaacttaattttgagatttaaatttttaatttactacaaggcaattttaaataaggtctgaaattggatgagtaggcttccaaggtcgtgcgtatgcatttctacactttgttaaaaccacagtaaatagtccattcatttgggtatatatgcagttagatcctgaagatacttaatcaatggatttatgtggcttaccctcacccccaagagtattactggagaaagatggaggagaatgttgcctaacctttactccaattcattattctcaaactgtgtgaccacagttacctagggtgcttgtaatgcatatgatgtcagacatactgaatcaaaaattctagggaaggtatctggaatctgtattgctaacagacttcccagctgagtcttatgaacagaagttggggaaacactgtcctggtttaaatggcataagattaattttcagtaaataggtgttttattcaaacttgctttatctctcttgtatttctccccatctcccacgttaagatttgtaaaaaaatcttaggaagagctaatttgctttaaattcactttttcagtctccaagctggcacaggtgagataaagttttctcaatttttttttcttctcctttccacaatttaatcaagtgttaaagtgaaaaatctggttctttgtggagtggtgcataagaaaaaaggggaattaatttacactgcctggtgtcaggatgtaatatgattatgatggcaaagctataaaaagaaaatatccaaagctcataaaaaaattcgaaggaggtcactgttagagcagatggatggagcagagtgcctgatcattgaacggctactgagctaaaaggatattcaggtcgaggtgtacatagctgggagaaggtcacaaatcttaattaaagctttcaaggggaaagtcctggatttgacagtagatgcatattgatttgtcttactgtatagaaatgactaaaaggactggtaaatagagtgtagtcagctgtcaatttcaattaccctgagggaatctaatacagtagagggttcctacgctgcattctttggagccttctctcctttgtaaccagaaaataccctctcatgaaatgcaaacttattttcaaattttaacaaaaaagctacaaagatcaagtgcattaaaaaatctaacattaagccaaaaaacaggattattaaacaaaaatttatattgacctcaatatttttaatgaattctgccaattgttgagacatgaaaggtaagctaggaggcaaaactaacacaccttaaaaacaaccaaatatttaaattatattagataggattataccaccaatgagagaagtatttgtttctgttttattctgtgaaagaattttatgacacctaaatgtgtgtgtgttcatggattacacatattatatacattattgtattgtatgtgtattacgtaataataggtatagagaacaaaaaataagttttttcaaaattatgcacattattcaattgtatgatctttaagattcaaaaatgaattaaagttttcatatcagatgaattactgaaacaatattttgggttcgctgaaacactatggtgaatatgcggttcaaagaagaaaaatattcttgttgaaatgattcaggcatattgtagatggctgtactaggtgacttttaggtgacttctttataactttataaagttattttagtctaatctcttctaaatttataagggcctatgactctagaaaaggcaatataatgaaattttttaaaatccatgttttggaatcctatgtgacagggcttaaatcctagcttagggcaagtttcttaatatctaaaagactctatttcagttgtttcttttgaattgtagggaatctatctctcctctctcttctctccctccctctctgacatctgtggtaaagattaaataaaatattgcatataaagccatgtacaatatatattaataaaagccactgcctagctaagggcccaattaagagtagctgttctacctgtgtatggctgataacatttttagttatcaactgagatttctttactcctttatacttgctttaatactctataaaggtggttcactgagggatgatgcacttaatctagaacaaacgatcacttaagtttctgttttttaaaatctaaacaaagagccatagtcttgaaagtcagcattatttatgacaatagcctgactttttgaaagaaaagatttattgagctatctgaaactgaagaactgagaacaaaccgtagagtgggaattactatatgatgatgtaaaagttttgatgtttctgggaagggaaatgagtcattgactagctagtgggagaagaattcaggatgtaatgagaccccagtcattattcaagtctctgtgaaggtggccaggattccagctcactgggttgaacagaagggagattgaataataaaaattctaaggaacatccaaatgtaaagaggactatccctcacttcccagggaaaatttgggtatcaaaaagaagctctctttgtatgttcttcgaccctagaaaggtagacaagcaatggtcaagagaagtgcccaggcagatgggcctgactgccacctcacagagttctcagcccctcagaggagtgaaactctgaagtgatttcatggacctcatggagggcatagaatgatttaaatagaccgtcaaccttaaagtccagagatgtaacaaagaggatgcagatgcacatatctctacctgaggtaatagttatacctgagacaatagcagtggatccctgtgcacactgatgtaactggacacattgcagctcagtgagggtcagcgtggacacaggatatgtgtgaacctgatgccttttctccacacttcagtctccctttcatgagagaaaggaacatgctattagtggtagggtgtcttagtcacctcctatttaccctgtgggtgagggagagctaaacaccacctgaccctgaagagatgagaccaacagcaagttattagtcatgtctactgatggcctgggggaggaggacatggcacaccttgcagggccacacaggagttgcactcaagagcagagtgaacaaccaggtctgtaggaggtagcctttggagaattaagagggtagggtgctcccagttcttgtggaatgatgtgattcacttgtttgatttggcaggcaaacagagaacaaaacctgctactcaaggataaatagaaactgtgcctggtccccttcataaggatggtggtctgtctaggatacctgatctatgggaggagaacttgtagttaggccattagagacctgttttatcagatatcaagcctaaatttttggctttatgctacaattgatcacttgatgctttgacatcagtttaaatcttgatgataactgagacttttagggattaggagatgtgccttcctaggaagcaaagtaggcacctgaccaagcagagagggccacattttgaggtggttgccaaaaacatgaacttcgggcatgtctccatatataaccagtaaaagcaattgagagacctgtgtgacattgatgtagagagtggatgctcccagggggtgtgaattgagactaaccaatgcttgtggcagtggtgacatcaagggggtagagggacatttgtctcattgtgacttaaatagttctttgaaaacccattaggcttatcaattaaagtagctgcctggggctaactacctgaggcctatgggaaggctgcatttcaatggaaagctttcttcaagattccattgtgtattctgagacataaaatgagtgccttggtaacaatctagtgtctaaaactgcaaatgagataaggaatatcctgttgaggccttgtattgtggccttaggatatgtagagaaacctgttgatttggtttatatatttatatttgggtacctgtgaaacaagagattcacagagttctttaaagtgagacccttaggcaatggtctaagagttgtaaaaatatacatatgaggtgaaatggccagggcatccattgccaagataaatgtctagagtgtgccaattgtgctgacccttgggttctattctttatcagggacatcttggttaaggaattaagagcaacaactctctactgagctctatcatgtataattgtggcaacatcattggtaaaatgtatggccttctattgccattcattcagttgatcccagggggctctccaggtagccaaggactctaggaaagggatgacttcccctagcaccatggttttggcaaaggactgatggtagaggaggccaccaccttctacagatagaatatgccagaagggccaagcttgactccatcctgtcgcaaagaggtctcatagctaggccagattcatgggggtgctgctccaatgcattaccaggcattgcagtagctgggtacagagggtcacaggctcaaagtctgtgagaccctctatttccagaaaagcccagtgtgtggccagtaattgccactgtaatggtgtatagtacaaggccaggaaaggcagtttcttgcatcagaagcccatgagcaacttatgaccatcacaggtggcctagagactccaggaggcatgagatgaggtcgctgaagcctctgagggcactaactggagtgcctgttgatttcattttggacagcttctacagccttttgttgaggaggttcccctttaagatgggcaatctgtaagtaacagcactagtgaaattaaagaaaatttgcaaaagaatatgttgtctccagaacccaaaaaagactaaaagatgttggacttgtattaaccttgtaggtactgagagggttaatacctgttttttgacagtatcagggatggagcagcttttgctttaccaaataactttcaggaatttaacagaagtcacaggactttgtactatgtgtgaaatatccaccctttttgtgtgagttcctttgtatttgtatattcttaatgaatacgtcaaacaaatcttcctggagaaggatgtcatcaatgtaatatacctgtgctcctggagaaaggtggatgtcattaagatcctgcctgcaaagactgtgtgcagtagcaaggctgctgaggtagcccttgagtagcctggtaaaaatatattatgtagcagcgcaccagcatggcacatgtatacatatgtaactaacctgcacaatgtgcacatgtaccctaaaacttaaagtataataataaaaaaaaaagaattgcatttgtgaactaaaatatatatatatatattgtgtctcatgggaggtaaaagcaaactgtgactgctaaactgctgacattggcaccaaatggatcatattagcctaattcatagtagcaaaatatttatcagttgctgattggatggagtcagaagtttcaatactcagtttgttggaaatagggacctgaactgtatgggaccatggcattaaggttgcagcagtctactgtgctgcaccatttatttgttccaggtttaaggacaggccaaacaggccagattgggttgttaaatggagaagcagtggggataataacccctgcactctatagctgtcatgtaacaaattttaatcctcaaaagccctgttttaaattactttgagccatgttaataattattttaatttggggtggaggcagaagagtcgggagtttccatcctgtcaagccaatttataagtgtcaagatttaatctaatttccatttatttttcattgggtcagagcgtccatgtccattatgggatattttagggcaatgattgctatgaccatgatgagaaatttaggcaagacagtaattatgatggttaagaagaggcatatctctttgtcctctattttatatgccagaactcccctaatgttatgggggataccatgtttaaatttaggaagatcctagtcataactgtaatctgagccctaatgccagttaaaaccatgaaggtttgccaattggtgcatttcagcaggtattaaagttaattaagaacctatactgtagaggcacaaaagccaatcagtgcccctttatcttggctatataaatgcctttaatatattttgaatttccaattgggtcaaattgtagatctttgttttagggttctgttgttgttgttgttgttgttgttggttcctccccgtatccaggatatttttttctttgctttttaaaatttcttttctttctttttttttttttttttttttttagtggtggtcactggacatatttggtggtggtggggtggtggtgtgggatcctctttaccctgatgatacttataagtcttttctctcagagagcttcaaattagtatcatcagggttaggggtttcccccacagcaatggttgctttatatggtttaaagaccctgggcttaagttgagtttgaattaatggtgccatggggtaccacagtgccacaaaggtaacataggtatttctctataacctcaaggattaggatctttattgcaacagagacatagtaagcagagtggtacagggaaagaaagctaggtttataacccagactcaatagaccaaaattatctcctgctgccactgccctaccgtttctgtcgtgtggactttttccctctttgtttgtttctttctctgcacaaattccctgagaatattttgagtttttagctaggtgaaattggagctttctgtaaaatcacctgtggtgcaaactttctgggtacttatgggaaaacattagggagcttagtggcctttctcagaagtggctgcctcttcctctaggaagtgcgagtccatctctctagagttgaggtccatatccagtaaagtcattagtctatggcttggatagggccagcaagcccatgattgcaagattggccatttggtgtgctagtaggcagcagtgctgagcccaggcatactggctatgggttttgcattggcaaatcatttgagtaccaaatgctccttcctctccccacccttttcttttttcattagcacctgtgccacaggccaccatggatctgcacctcgatgcccttcggagtcatgagagtgcaagcaatagcagctcaggaagcagcagcagaggagaccagaaaggtcactacctttgcatgaacaacaatggcaaccaggataccatgcttggttctccatggtgtggccactttccttcccacaaacctcacacagggctgcctctgcgcctgttccataggtgtaccattacaagcaatgtctgtattgctgctccaagcagccagtgacagtcaccaggctagacatggtgatcagagagctctagcctgagctctggtaagcaggaatgaagtactgactggttaaggcactgttttctcattgcatttacaggctgaagcttcagagatcacctgccaaacacaggctgaacctgacagcatgtcacaccagggtatagttaacaaccattttcttcttggggacaagagcattgcagagttaaaagagatggcataacagtgccacataggccatagctcaagcccatcagcagttagcagttctgtctcaggtacccttgccaaataactcagaaccaaataaccaaggaacagttaattttaactgactaggtgtcttctgaaatggttgggcatgtcatatggttcataacaccagtggattttattgctttctattcaccccattggtgaacgaaagattcctgccctggagattcagagatgcctagacaaccaacacccaacactggacagatgagatccacagcagtttactggtcatacataccaccaaaggagaagaacattgcagggcatgcaggagcatgtgagggttgtaaccaggaatagtatgaacaaccaggggctgtgggagtaatagtaacaagagttactattagttacattaggtaaccagaataagacttggatttctaagagtgacatgctcaataaaagggtaatatgacaaaaccctaacctccaaggaagacagtaaggagacttgccagtcttgactttgccttggatggaaacgggggaaagactctcttaataacttatgaacgaaaatgaaacctcacattgagtgtgcaaatttccaactgtgtagtctatgtaatccgaacaaaagtcatgctgagaatataaggctaccaatctggtattgccccagcagaggcaaattcagagctaggtagaggaaaacaccttaaccccatttaacccaggtctcaggtaattttttaaaaaaactttttttttttttttttttttgagatggagtctcactctgttgcccaagctggagtgcagtggcgtgacctcggctcactgcaacctccacctcctgggttcaagtgattctcctgcctcacgctccttagtgtctgggatacaggcacacaccaccacacccagctaattcttatatttttagtagagacaagttttcgccatgttggtctcaaactcctgacctcaggtgatctgcccaccttggcctcccaaagtgatgggattacaggcatgagtcactgcacccagccttaagggaaatgtttttaaaaatatgatctcagaaccccaaatcacgaagcaaccaaagaaataagtctccatgagaaagattcgacaaaaacggtaaacaatgggatcagagtataaagaatttaaatattggaatttttcgtagagaatttttttcactatttgagaagaatatattttagtactgtggcataatgtataactttttataataataactatatatgatatagtataggtcttaactgtatcattcatcatacagttatatgttaaaatagttaatatttatatgccataacatgaagcatgatgtcgtgtactttctcctccatttttcatttggaatacattctacaacatgacccaaaatgtaagaacttgtgacttgtaacttttgtttaaagccataattgtgcaataatgtgctacagaaagattcaattgacttctcttacgaaacaagcttcaatgtatcagctctattctgtgaaatgccctttaagtaaaagataatataacattttaatgcatcgtgtataatgtacacatgcatattgtctatgtactgaacacacattgtatatgatattgttattactatttgtaaaaaatttttatagccttaatatatttgaaaagaataattgagggttttttaattttttatttcttttaaacttacagaattttaatgggaaaatgcttatgtcgtatgttaagcaaacacagcaggaaacagtacagtattttgaaaactatttaaaaccccacagaaaaaagactgaaagcaaacagttgctcttgtgtgataagactactgtttttatttcaattattaaaacattcctttattatttttactatgagaaaacatatgtaagtataaatgactaagtaataagatactgtaatacaatgaactaaacttgaaaaagagcaaagtagattgcctagaaataaaaatatgataattggaaataaaaacagtgtgtggattatgcagctgattagacacagctgaagagagaatagtgaactatatacacttatgatgcaattctctgaagaatctaatacacttatgatgcaggtgccgttcttatgtagagcgtttttgccattcttatgtagagcttttacatatatacatacacacacatatatatacatatatgtatatatgtatatatgtaaaagctatatatacacacatatatatgtatatatatgtaaaagctctacgtaagaacggcaaaaatgctcgctctctatataaaaaacgctatatatatatgtgtgtatatatatatatatatatagagagagagagagagagagagagagagagagaaattggttcatgcaattatgaaggctgagaagtcctaaggctttggcaagctagagactcaggagagctaatgatatggttccagtttgtgttcaagtctgataaccgggagacccactattgtcggttccaggccaagtctgagtttaaggcaaaagattgaagactgaagacagcttgaagacaggcagagaaagaaattctccttctctctatctttttattccattcaggacttcaatgcatgggatgtggcccgcccatattgagaagggcaatgtgttttatgcagtccactgattcagatgttaatcttttctggaaacaccctcacagacacaccccgagaaatggttaaccaagtatctgagcactttgtagcccagtcaagttggcatataaaattagccatcacaattagcaaacttcttaacagcaaaaatagaataatgtggaataatattgttaggtgctttcatcctaaaatagtgtatttgtaagaatgaagataaaaatagatcttttcagtcatcaaaaaactatagttcccaaaagaatttcaaaggctaaactccaggagaaaaggtgaattatctcaggaattggaacatgaaaaaaataacattgtggaaatataacggtatgatggatatacacagaagaccaattcttaaatacttagatatatgctaaggtatttagatatgcagtgtcatgttaatggcagcttgctttcagttggtgaaataataactgtgtgtgtgtgtgtgtgtgtgtgtttatgtttagagagattaaatatagcaaagtgttgatcattgaatcaggtggaggctccttcttgaaaccccagtacttttggaggccaaggagggaggatcacttgaggccagaagtttaagaccatccttcaactctacaaaaagttttaaaattaggcaagtgtgatgctgcccacctgtagctctaactattcgggaggcagacaggacattgcttttagctcaaacaattgaggctgcagtgagttgtgatcatgtcactgcactccagtctgggaaacagagggagaccttgtctaaaaataaaatataccagaaaaacactatagctgaaagccatctatttaataatccttagaatttttgtcacaaattattataaacaagatctattgtttccatgatcaaaaatttctccaccaatatctaattttgtggtgcctttgtgagtcctccaagatcatcatggttcaatgaccacattgataatcaaagcctttttcagaaatcaatggacaataagagtgtatttgtctatttctagagtgtctattttattttgtattctatttgtctacccttgaggaataccacacagaattaatagccatcaagtctgatagtgtaagtcctttactttttcctttctttttggaataagaagttattctcagtctgtagcattttcatataaatttttggaatcagcttattactctattgtggtagatttgatttaaaaacttcaccttttaatatgctttaatggttctccttgacatctgtctctattttcagaaagcgcatcttttttttttttttttttttgagacggagtcttgctctgtggctacactggagtgtagtggcgcaatttcgactcactgcaacctccagctccctggttcaagtgattctcctgccttggcctcctaagtagctgggattacaggcacatgccaccacgcccagctaattttttgtatttttagtagacatggggtttcaccatgttggccaggatggtctcgatctcctgaccttgtaatctgcctgccttggcctcccaaagtgctgggattacggcatgagccactgcgcctggccagaaaatgcatctcatacacacctttactatgtgatttagaagtttcatgattccctggtgcttacaggatacgttcacatattgttcatggcattcattttctttcccactatgttatgactatgctccaactcatttttccaactccacgtgggcataacactccatggcagcgaaatgtttccttttctcttatttagaacttgctttttgcactcccctcttttagcttacagatatttctctggcttagtaagcctttcattccctttctacctgtgtggattcctcccaaattttgaggctctgtgtgtgttctacagcctttgtgaaatattccttaatcaccccaaaattcagtaaccatttatcttttacatttctatagtagttttatttataacacttatttgaatatatcatatatttacttctatttttacatttcctttaatatgcaacatattccatctgtacgatgagttcacaactctttcagggtggggaccatatattaagcatcttcatgtgtccccactgtttctatcacaatgcttagtcttatttgccactgtttccccagagtcttgcactgaacggaagatatagtagatgcttaacaataattgattgaatgaggactgagtctgtgctcaataaatgtttgctgaggtgtaatttaaggagaaaataatgagttgtgagatgaaatgggttccagtcttgtctctgttacttgctagctaggtttagccaaacccttttatttctatgatcgtcagtttcctcacccttaaaatgaagacagtagtgactaatccacagtgtagaatcacatgaacaaattctcaataaagtgctttaaaacaatgcatgcttaacacatgcatatgccatttttcatatcataaaaatcttcattatagaaaatttggaaaaaagtaaaattcaacgaagaaaatagaaatcattaataataacatacacaaagggaataactattataatttcagtatatttcccttaaaatgtttttctgtgaatgtattttaaaactaatatatgcatagtggttttaaaattttgaaaatttatgtttttaaatattttagatattttcatggcctcatttttctatttaacttatatagtactaaaggactatagtaacataattttgtacaaaatgtttttataaaagttaaatgtatcaatttaaataatgctacttctattaacttaattgcaggttaatataaacatgcataatttgatgaaaaaatatttcaattagatgatttttctttctaaagttgtttgccctttggttgggattttttttcctctatgacccagaaaaattctcaaaactactcttaatttttgttcccataattttgattgaattttttgcttgctgcaacgttataatgatttcttctgtaaagtaccgaagataacttagaaaacaaatcagagctcaaaaaggcttaatcatttctctccttttctttgttggaagaaaaaaatgaatattatattcatttaaatatgggctaagagacatcctaagagtttttctttaaattgatgaaatagaagaaaaagacactaccgaaactgtgggtgcatttaaaaaagcattatacctatctattttatacccattttatttatccgattaaagaaacatttataagtaatttcagtactcagccatgttccttgctttttggctatgcatattttacatagttggtatatgctctctaatgttaacattcaagaaaattttattttttcaaaactgtcattagaaattttgaattatgttgatttgagaaagattgcatttttaagatataataaaatgatatcaaataaatatcatctagcttcaaactaaatggtgtgtaaaatatgttgtgatattcttgtatatgtgccgctgaaaaaattctggcaggttatgcaccagaattacaacagcactgttactggatagcgggatggcaatctctttttccttctttatgtcttttggaattgtccttttcccaacaacaagcatatattaatgtcatatgcaaaaagaaaaaaaattcatgttgaaaagtggaaagacaattattttatttattgagtgcttgctgaataagaatcaggcatggcttttggtcctatgaatacatcaatgaaacaacctacaaaaacaaaagctctgctttgtggagcttaccttctagtgaagggagacagacaataagcaacaactgcaatcataagtaaatgcgaatacattttcaaagctagtaagtgctaagagaaagtaagaggaattagaagctggagggatgagatgcaattttaaacaaggtggttaaagcaagccccactgagaaagcaggactctgtcaatattatcttttgtgaccctttttcctatgccatattatctcattttaatattactcagattaagaatgcttttttaggcatcatgaagaaatcaagaatttcaatcccattttaaccattggagagaacactgaaacatggtttgtttctgaaagtatgtgaaaatttcacctttagggagaaatcttcctatgggcagtgtaggggagatatggttttctgtgactggtgacttgtatggttcagatgttgcagaaacgtagacaggtttgagggtgtgctgggaagcagattgtaaatgattttttgaatgcctttttaaacaatatcaactttctggaaatgtctcagagttaatctctttttcttgacatggagtcttgctctgttgcccaggctggagtgtagtagcgtgatctcaggtcactgcaacctcctcctcccgggttcaagtgattctactgcctcagcctcctgagtaactgggattacaggcatgcgtcaccacgcctggctaatttttgtatttttagtagatactggccagtagatattggccaggctggtctcaaactcctgacctcaggtgatctgcctgcctcagcctcccaaaaccctgagattacaggcatgagccatcacgcccagctgcgttaatctctttctgcctacagtccaacatcagaggctgtctctagagccacgtcaacactgttgcttaaaagaataattgatattcataatgatactctgtcatagtgcctataaatttatatgactgatatctaaataaattccatttgtgtagttgttaaccaagcacatttataacattagttcatttgagtccagggtagtaaaatagataatataaatcctactttttaaaaatgtagaatgctaatcaacaaagaagttagatgtctttctagaagttgaaagtccaggattcaacttcagaagtgttcacttttaggcgaccaaacttcccattgctccatatagaccgtgtaacaaacaagaggactaagggcagtcactttgagagtgtgttaatgcagttaagtagtgcccaaagctctgctttcaaatcatcatttaaaatagttttattttgaatatgtgcaaatctaaattacctaaggaggttttgaaaagtagctgaagtcattcttagtacaaagagatgggatcaagtgggagtttttttttttaattaaaaacagtttactataaaatacgttatattttaaatagaacatgttaccactatttgatgtatgagtataaaatgagttgcaatgatggagtcacaaaaacagtttcagaagtggaataaatatgtggctacttaaagtaattgctttgatagatgatactcatttccatctataaattttggtgtgttagtaaaaatagttctattatttggtatcacactgcattttccctttgaaagataaataagtatatattaattataaatgctttctgaaatgaaagtttaaaatttaaagtgtccatgtgtataaccatcagatgtcctagatgagggtcgtactgtatgagtttttgcagcaactactgctctggctctaccaatccaggtttactacccacatctaaaaaccattgtatttgccattagtctacagcctgactcctatctattttgatgttaacaaaacaaaatctattttaatactgaataactgaactttcagtcttattatttatttacttttgatctttattatgaatattaataatgtaaaggaccttcattttcagctcataatcgataggtatcagctattaattcaacattgatttattgattgtattaagcagatatgttccagtctctctactaggcagagggatatgaagccatttctattgtgaccacattggtaagaattaacttccccttctcttcttcctactgatgtcataaaccgccatttgacattttaaaaccatatatctcattgaaaagggaactgactttttaggccttgcatgtaaacccccaacacagacggccgtgttccctctttgtagggaagagtacaagcagaccacaagaacttcaaaatcacattgtacacaagaacttcaaaatcacattattttcccactagggcaaattcagtgctggggattttgtgtacttggagtgtatttgtgccccctttgaaatctaagaatactttgtgtacaatagtagttggaaaagcaactaaatgagaaatgggtggtctgagggcagcccttctctgaaatttgcttacttattttctggggttccattaaatgctgtgttccctgtgaagcctggcctcattttctatcctggaattaagcgctgcctccactgctcacgtggtaaaggtgctagcacgcagccttcacagactgccagttaaggcatgggaagaccttacttactgtgccaaattccacagtatctagcgtggggctttgcagagttggtgttacataaatgctttttgaattgaaccctaacttctttaagcaggctccagtacctcaataaaataagaaccaacaatatttgagtcactggttagaaagaataatgtgaaacaaatgaaagtgaaggagtataaatagggtttgaggtaaggtgggaaaaaaagaatgagaagggtttcttcaaatccgtgctaaatcctctcaattctgaatactctgaagctagaaataaaagctaaactatataaaatgtagacagtagggatgctttgctatggttataaccacttatattcatctaaaggagaagtgaaaatatcactgtattctggataacacccaatatacatagcacacacacacaaacacacacaccacacagggacacacacaccccactcaagctaatgtattaaaaaggaaacctgtttaatttttagaaagactttttcatatacagtgaattttcttttttatttttatccctgtagatagctgggtttgtttttgttttttgttacggaaagcagcaggaggaatcatggtaatggaagaaagagtaccgcctaaacttaggaaagactttgacacaaattaagctatgttatattgatgcatcacttaagtgtctggatctggaagtctggactatatcatcttttcaaatgtaatatcctgcaatcatgtgagaaatttattagtccttttgggaatctgcaagtggttgggagaagcccaactaactccctgcaaacctttatggaggatacatgttgaataagtctttctagtatgaaactaaaaagaataagatgaccagttaaatctgactcccccaaacacagacacatactcaaggaggctacatagtttattgcagtccatcttttttatcattaacaacattcatgtatattagtattgtaagtggccttatgttagtataagaagtaacattgtgctggaagggtattcagctttgtgcattaatttatctggaaaattatgaaaaaattaatttgactttgcattttgaattttatatgtttaagctgtcaaaaattctctgtggtaaaaataacttccatgtgcctaccaatgtatattgaaggatctgtctatgcaattagcaagcaagaacataaacattaaaaaatgtgcgtgtcaacaaaccaaaggtagggttccctttgacttacactagagacagagaaataccatcttttgaaaaatttcaaagacaggaaagtttctaagttgaaaaaaattacgcaggtctacatttcatgtaagttctgtttagcttaaaatgatcttgatacttaagtgaataggagatatgtaaagcatttacattttaggagtgggtaattttactttatttccaaataataggatttgaggtcaagaaaggtaactagaaagatcaaactgtgtctcatctcaccagactctgggttcctctttgtaacttgtgggccagcaacaaggctttgcacttaataatttagtaggagctcaagagatgactgaatgaataaataatgatctgtttttgttggcacataaagaagtaattctagttctttcgccttttttggaagaggttcgtgtgtttcaaaacagaaaattatatgaaataaataattcgtaggcagagaactgaaaacatgtagcataagggattaggatactgagagctggagagaggtagataaggcatttggttatcaggggagaccagtgtcagtctgtccatttgtcagtctctccttctctcttagtctttggtcaggaaaagcactgacattttttccaaaatgcatgtttttacttctttgttattttgtgttttttcagaaagtctgactcatacctccagggaactaatttagcgggcaagaagtttatttgaagtcttaggtataaaatgagcaatggtttcactgtggaagatagggtgagtgatatgtatctggagatgagaaaagaatggatctaccattttgcaatcttggcttcaagtaaggaagcttgagaaaataatgtgtttgaattaagaaaatggacctgttgtggggaggaaacagtttgcaaaacttctgtttgtttataattatgcttctaacatactaacatcctctttttcttagcaggctcttcggggcccactgggttctgactggtgattttttaatagcctttagtgctccatttatcttgaacatctcgtcctcttgagtagtgctgatgttgcattctcaatatttcagagactgtaaagatgctggcatgtgtgtatatacatatataaatatatatatgactgtgtaatagtcttttctcaagcagcctgaaaattgtatattttcaatagagatagaagtgtgtctcaggcaacgtaaattgcgttaccttgctgtgggattgcaaggacttttgtgaaatctccaaatgtctaaatggttccagctcctgtaagcagccacagttgacaaagcagcactcatctagagtcctttgttaattctctagaagagaaagaggaagagttgctagtgagtcagctgccttggttggcaaacataacataattagctatttaagcccagaaaatgaaaagaccctcaagttaatctgtcatttttctctgcagtatttcctcatctttctgtgggctatatattataattatcacaagccatttgaagagagcaattgtctgttttctatatgtatatcgccccttttaaaaaaaccaagcatgtgcaatcggtgttgtatagaaaactaacaacagacaaatgagagatggctactgggggaaggagaagctttcacttaacgatatgctatcatttggttaaattttcaaaatgttacttttagagcctttctgtgctagaatatctgtttatttataatttttccaggtggatttttcaattcttttaaattacaaaggtaatatatatgctcattagtaaaagtgaaaatatgtaaagaggtagagaaaaaggttaatattttccttgttctaccttccgttcccaactagaatttttattatttgtataaagttgaggttacattgcattcataatgctctccccttttccccctataaatattaatttttaaacttgctttatttcacagtgtgtcagtggatctaatacattctttaacactgtggtataacattccataacataattacatagcttattcagatactttttttcttgttgggctttcaggttgtctccagtggtacaataaatctctttgctttggagtttaaagagcccagctaagagtcaccttgtggattcaaatattcctgccaccaatttctaggccattgacacatttggtcaggaaaatagcttttctctgtagaaagtgccatcttcctacatcgctgtgaggctgggcggggttagctattcggtctgcctctggtgaagcatgacatcttggtcagtcaatatcagtggcagactgaaaggaagattgtgccaaatgtgagtttgccacagccaagtacagccccgaagtaaaacagttttgttacttagcctccctatatggccacttctgttttcgatcttaaaatagtagttaatgaatataattttaacaaacttttagatagttttgtgattcttttattttccagcatcgatctacaaaaaggactaattagaaagcctctatgtgaaataataatataaaggcaaaaggaaaaacttccaaaatagcagtcagctagcagcaaaataatcttgaaataaacgtgaaacccagaatttctttttccatgctgacggcccactccaagggccactttttagaagttcttttttaacaacagacattggggttcacttgagggtggagggtgggaggtgggagagctgcagaaaagataactattgggtattgggcttaatatctgggtgatgaaataatctgtacaacaaatccccatgacacaagtttacctacgtaacaaactttcacgtcttgctctatcacccaggctggagtgcagtggcgcagtctcggctcactgcagcctctgcctctgggttcaaacgattgattctcctgccttagcctcctgagtagctgggatcacaggtgtgagccaccatacctgactatttttttttattttttagtagagacagggtttcaccatcttggccaggctggtctcaaacttctggcctcatgatctgctcaccttggcctcccaaagtgctgggattacaggcatgagccaccacgctgagccaaaaaaaaaaatatttaaaaaaaaaggaatttctctttcaacatacaaatttcaactcaatattcatttaaaatgtcccatcttgctgaagaagtttacctattttattttatataaaatatatagcatttatttaaatatttaagatcgcatatcttaacattttaaaaactattattacatttaattgtaaggttttagactatcaggcaagtaagaattcatttattcatggagctgttcctttaagaccagcagagttaacttctttgcagttacacaggaagagatacttgcagccatagtggtttctgatgtgaagtgaattggtggaggacagagtggaggccagaaaatggggtctacttccaaactagccacttcttacaagctgttgagaagagatctaactgaaattaatgtaccatgggagggctcacaagataaccaaacattcaaactagagaagaacactgtgaaaagacagggaaccaattatgtgcatcagttgtatatatatatatgaagagagagagagattatttcatcactcaggtattttatgtatatatatatatatacatacacatatatatgaactttaacaaacttttagatatatatatgtatatacacatatttttccccctgttttctctatataaaaataataaaggcagaatctaaagtagctttagatggctaactatgtgcattatggggatttgaagagataattttgtgataatccatttcgtgttgctttcagagtgaactgaaattgatttgcatgcctgagtgctgacttagcagctgtgcaactttaaatgagtcgcttaacctctctgaccccccagtttccacatccacaaagcaagggtcatacttcagtacctcatgggattattgggaggtttaactaatgtaatataaaaatgttcatgtagtattgaataaaaatgctggttttcctcttggaaaatgcaagaggtcttcccaataggaaaatactttttgttaggattaaatgggatacacaagaaggtggtagaataaagaacatttagtgagatatgaacaatgatgccaacaatcagacatataccttatagttacaaagagttcatttattctttatctcattattgcttcaccagcatcctgtgaatccataggctaattgctatgcccgttatataggggaggaactgtgactcagagaaattaaatggattgaacaatatcaccttccaagtctataatggagcacattctttttgaccaatagtctagtgctctttacagtactctaagatatctatacattctccacagttgccaaataccaagcagttaaaagtctaatggattccaaaattgtatctcaaaacatagctctgttctcaaatttcccatgattcctggaaagacaataatatctatggaattaatagaatgactcttttttgggcaattccaaactattcctggactcctaaggaccatgctaagctcaatttgcatttcttgcattctatgaaccaaaaatattgtttctaatgtcaaatgcaccatgttttgtgactatgccatttagtgtttagcatttcctgaattgaagttactccctccaactaccatgaaaagttggatttgttctgtgtagcccaaggtttacatatttctgccctttttaggtatcacaaatgagcatctccatccttcggtcaatacttagtgcattctgtgttagggtgtctatctctgcaggcatatattttctctcccttttgagagtgcaagttccctaaagatggaaagtataccatacgtctgtactctcaggcctagctgagaggctagcattacatagcttttcaatacaatgcttctgctttcgagatgctattcagagttgacttctcaggagagattcattccaaaacataataaaaaggtcagttttagagtaagcaataactgttaccttcctccctttatagtgaatgatctcttgagaattctttcttagagagagacaattgctagggagataaagggtgcttaggaaagaactagtaattaccatgtcaacctgaaggtaaaaaaacctaaaataggtcctactcttcaaccattaccatgagtctatcgaaaattaggtctcagaccagaacagatcaaaatatttagtgctctctagggaaaaagcttttgagataaagtggaatttcttatttctaagaagtaggaaaagagtgttttgtttggtctctacaaattatagttatttggtttcagcctgaacaatcaccacaagcaaatactggcagaaagagtctctacaggagtggtcaaaaaagtcagttttcatttccttccaagccctagtttggctgatccatccacagaaaagcagaacaaaaggcaagggattactgcacccttaagcatccaagtggctcattcggctcaggggttatttttagcaatctggctcacactgagggcttcctgctctattcagcaaatgtgcaaatggatgctgcaggaccgtaacagtagacattgatgaaggttgtgatcaatgattagactctcaagcctgttgtgtttttgatctagccatgcctttcaaccactgtggtgaacatttacttctgaataggctcatcttcttcatatgcacattctatttgtagatgttgctatgaggacagattcatcaaaaatgactgacgtggagtctggggtcgccaattttgcatcttcagcaagggcaggccgccggaatgccttaccagacatccagagttcagctgccacagacggaacctcagatttgcccctcaaactggaggctctctccgtgaaggaaggtaatactcaaaatcctcttacaattaacagcacttgtcccttcttaaccaagccttttctctggacagtctttcttttatctagttaaaagtgctcagtttccttatttgtttacttaaacctctcagcttttgtttaaggcttagtagatgttcagccttttccaaagtagaatatttcatcttttttcttatgctgtgtatgtggaaactgaagttttatttattcattgcatgtgtatagtcatgcacaaagctagtaattgggaatacaaaggtgaacaaatatgatctttctctcaatgagctttcaagtttattaagaagtattcataaataaaataatttttcttctgccatccattgacaaatcactttggaagcttctgcttcactgtagtgtgctacaagccctttaattttcaaatctaggaagaagtttactatcaagtagagatgagattctttcaacagaatttttgtataaaaggtgatactttatatgaaagtataaggatactttaaataaagtgttaaaaggtgcctttcatttaaaaaccctcatggagatttaaaaaaacaaaacaaaaccctgaatcaaagttaaaaaatacactcagagagattaaagatcattttagttccaagccattagcaaaatactcacgttttgtgccccattttagactctcaggtggactctagtgtatgtttgggaatttattcttggtgacaatgaagcaagtgagaaccagaagccgcttgcatctaacccattcccgggagcccaagaagaaggctcttggttctttgcttcaggaggttatttactacctggtaaagttgcaaatgttcctggttcattctctatgaaatagttatatccttgtaggccaggagctgtgaccagatcctgcagttccatgattacctcatctttttccaaaggccactatttctcatatgcaacactataggtgagagtaaaaaagcatacacatcaacgtaaaatattataagaagaatgaaaagaaggaaaagataagggaagaaagaaataaacatatatgtaatgtttttggccttttaagtttgaaaatgtaatatgaccataggaagatgtcgttgctgttcaagagtccattctaaactagtgaggtagagaaggcaattacttgttcgtgtaaaaaccgtaattaaattttatacaccttcaacacacacaaaaccttaatgtttactgacattacttaatcaagcaaaagagagcaaatacactgtgggagagtcagcagtgttctccattttattttggtcactagagagactaggatctgaaagaatatgttcctgtttttatatttttcttcatatcattttgaaataaagtcaaaggcatcaattaagaaactgaaaatgttaaagatgaatttacaaataacaccagatgctaaagattacacaaaagggtgaaggcaagttgtaaagtgaaatatgccaggcacagaaaggtaaataccacatgatcttattcatggaatctgaaagagacaaactgctagaatcagagagtagaatggtagctaccaggaaaattaggaaaatgatggtcaaaagagataaaattacaattagacaggagaagtaagttcaggggatctattgtagcaacatgatgactatagttaataacaatgtattgtatacttgaagattgccaagtgagtagattgtgagtgttcccaccacacatacacacacacacacacacacacacacacacacacacacacacacacacacacaaagtatgtgaggtaatggatatgttaattagcttgatttagccactccacaatgtatgcatgtatcaaaacatcatgttgcacaacaacataaatatatataatttttatttgtcaatgaaaaattaaagagtagaaaaaatacacagaaggatataggcttacataggtagatgacatagataatattttattaacaaagtcacaagtaagcagtttgaaggcttatttttttctcattagctaagcatagatgttattatgaattttaaaatgaatggtttccagttgctaatgaaaactgaaagcgggagtctgtctcagatgttatggtttcaataatttattcacttaaacatacaaattttgaggtgaggaagatctgcagatttccctcagatctatcctttgtttttatttttaatttttttaataaatatgcctaagtggcaggaaatctaggatttcaagtgttttgcatgctgcatgaaattaacctgagatttgcccagttcataatctgtcttaatctatcccttataaattgataaccatgataaaaaggtcaatgatatttgatgacatatgaacaggaggtgacagagggtggcatcctgggatggagaaagatcagtggatttgggatatgttttataggcagaatcaataggacttgctgatgaattggatgtggcagagatgaggaagagaattggaggataactcctagagcagtcaggcaggtgctgatgccatacaccgagaagggttagcctagaggatgggcaattttaagagttggaggagtgaaaatttttgtcttcaggatgcctacgagacatctaaatggacaagtcaatgaagcgatttgatatataggtctggtggatcagacggaaaaagtttctgagatatacatttttgaatatttgagtgtattttttttttttgagacggagtttcactcttgtctcccaggatggagtgcaatggcgtcatcttggttcgcttcaacctctgcctcccggtttcaagcgattctcctgtctcagcctcctgagtagctgggattacaggtgcccaccaccacacgctgctaatatttgtatttttagtagaaacggggtttcaccacgttgggcaggctggtctcaaactcctgacttcaggtgatccgcctgccttggcctcccaaagtgctggggttacaggcatgagccactgcgcctggccttgagtgtatattttcaaaacatattttatatgattgaggagaaaacagtgcaaatgaaattatcccatacctgacaagccacatgagtagattaccttttcagtacaaatggaaccacagaatatgagaaggaaagacggagccttagaagtcctccactcttttgatatatagatgttaccataactaaccccaaacaggttaagtgacttgcccaagctcacaaaaattaagtgataatagaatgtctggttccaaagccttcatctttcccattataccaatttttctctataaatgtttcatagaaattattttgggtgttaatgtgtcacccagaaaaaaagggtgctgtagtcaaatgagtttggaattgctggtttcaacataattggctttttacacttctcggaatgtttcctttttagacaaggacttctcagagcctttgttacagagactttaaagtaatagtgtgtctacacccttctaaaaatagaacatacaacatttttttctctcatttatttggccatctctgaagaagcatcttgcagaattattgttctgggaggcactctaaaaatgtgacaaggagtagaaaaggcagttgatacaaagaagagcagaacacaaggatggaaataggaaatgtaaaaaaatagactattatatctgatttatattaaacgtatattaatgaaaagcctaatttagtaaacagttaaagtggtatgttacctaaaagatatataataaggatctcaacataatatttatataaagtaacatgttactacatatatatatatatatatgagaaatgtttttccaagctaggcttctagagaacagaagaaccaagccagataatctagaactcaacattttcttgctttcccaagagttcttattatgatcaaaaaagtgagataagtaacagttcaaaatagcttattcacatttgaaatgacagtaacaggcttgaaagggaagtttgatgttgcactctcagagaaattatgttggaagaatatattgaaaatatattcgattacattgaaagcacttgacatatgcagaaggttgaagaataacagcaatgttaactaggaagcacataatatatgaaaaatcattttcctttcattaacatcacaatacaaaatgttttcctttcattaacatcacaatacaaagttgacagcaatcataacctcttgagcagattattgtttctttttatctgcaatcatctttgaatgtatttctaaacactttcacattacaaagcaaaaaatgagactataagaggtatttggaatcatgttttatattttagttaataatcctgagcaagatactagattgacaataaatgatatcctgttagttttcatctaattattatcttgagttcctagttcatttcacagaaagataacaacttaaggggacttcatatcatcttctgctcattagaccaacttagagatagcagatataacaactcttctctgaaagctataaagctttgtgtgtagcttgcttagaatcagtggtggcaagtgcagcttcaattactgtgcaaataatttagtgttttgtatttcatatggttatagagtaccattttctaccaagcttatttttctaagggatttctttcaataaacacttattaagcacctgccatgttaattagaaggcaaccaattatgattgttagggtgcaaattctcccttgatcccaattctcctccagctactgtcctagttctccatttctgttttgtaacaaaactccttgacagagttatctgcttctgtggctccaaatcttctgcgtaccattctttctctcaccctaataagattttcacctcaccacatcaccccactgctatttcaagatcacaaatgacatcatttctgctaacaccagtggttcattcttagccatcctcttgcacgatctcttagtcacagatgattgtcactctttcctgtaacgtttctcttcccttggctttccggacactccactcatctggttttcttcctgcttccctggctgctcctccttcagcttttctttcctcatctcccctaactctaaataaattggaggttatcagaattcagtctttggacatcatctctatcaacactccctcacttgtgatgtaatctgatttcgttgggataatgattgtgcttttgatgacttacaaatttttgtctccaacctggagctctcctgaactgcacactcatatactaattgcctaattggcgtctccgcttggatatctaatgggaatctcaaacttaatgggtataaaagcgaactccagatagtctcctgacaacagctctttctgcattttcccatctctgagtggcaattcatacttccagttaacaaaattattgccaaaaatattggaatcatccttttctcccctctttttctcgtattctccatcccatctatcagtgaatactgtcagctctactttcaaaattggtccataaatctgccatttttcactcacaggatctagtttttttggtacctctatgactccattttctattccaattttctctaccactgtcccgcttgcaaatccttcctgcatattattgtctttggctttgtttttctctgtgcttggaatgctcttctccccactatctatatagaattcttcttcaccttttcaggcctttactcaaatgtccccttctcagtgaggcattcccagctaactctgtctagaattgcatccttcaggccacaagacttcttgaaaatttctattttccactcctgttttaatgtcttcattagccctttttacttcttattgaccacacatttcatttattttgtttattgtccatatttctcatcagattttccttgagagccgggattcatgttttgttcattgccttgtacgtagtacatgcttaataaatatttgatgaatgagagttgaagaactgaatagagtccatcagatttcaaagataccattgatgacttggtaggagcagttttgcaggagtagtagacctaaatagtttcacttaaaaacggagacaacaaaagagggataccttttaaaggatgaaagagaagatagtatgtggaagacttacagttgaaagagggtctttgttagtttaaagacagtagtgacttgtgggaacgaaggagccaggagaaagggaaagtcaggtaaaatgaagagcgcagatgattattagagtcagcctcttgatgaagcaaaaatggataggatgggggatcatgaaggtattagactgcatagcaggagtaacaccaggagccagctccaaaattgtgcaaccagggtggttgcatagggctccttgattagaagagacttgcatttggtttaatgttctattcttgctgtcttgaaatttttcattatttttgaacaagcgtactgcattttcattttgcactgggcaccaacaaattacatagccagtgctcacaagtgcatcttccattgtaaaaagagggaaggcagaaagaataagcacagatcacggggagttttagatatttaatggcaggaagttgagggaactcctgtctgataactttgattatttttttttcctatgaagtagaaagtgaggttgtctcctaagaaagagcaaagggagtagaaagtgtgaagaagctggggagagtgcaatcctgcatagggaattggctaaggacatacaccacggagtcagttggcccaagctcaagttgtgactgtcactcactagtctctgactttggacaagtcactttacctgcttgtgtttcattttagtaatctgtaaatggaggctctgagaataccctagaagactgtctggcacttcataactctgtagaataggagaaagttgatcaggagaaggtagattcccaaacctactcatatcgctcttctttgtatagtttccatatctgaattgagggcaaaatatggacggtggacaaaggaaaaaccaatggttttattctaacataatacaaaataaatttcaatatattccacatatgaatggaaatttttttttcagatgcaaaagagaaagatgaaaaaacaacacaagaccaattggaaaagcctcaaaatgaagaaaaatgaaggctcataatctatcaagagtgctgaatttctgcatgttgaaagacttagtggttctgttttcttgagacatttaatctggtggtaactgtggtaacattgcagccctaagcagcatgtgtatattagataattgtgttgtgatgctactcactttgattgcaatgatgatgtccaaggtaagctattaaaaggcaggttacttccaaatcgcactgaaggaaaaggttaagaataatacatgatcacagaaatgcataccactgtctgtaaacccaacaaaattcactgttctcttttggatttatttagcctgatgtatttttaattcaatttttatggtgatgggcaaatcattcttggtaaatgtaaatcaaacatgattgatttaaaacttcatggaatttgtagaaaattatggacatttttggtgagaaagaacaatagtcaaaactcacatggatagagtgtgtttgttttttgccaaaaatgccccagactttttcccaaacctcaaaaacgtcttggaaaaattgtaaaagtttgataacagaaacatctttaggatatttttgtctgacatattttgcttctagtatgtgcctactgtgatttttttcatgtggaaaatgcaaaatttgtaacaaaatggttatatggaacatgcctattaaatgaattttactatcttccctaactttggtctgtgtatgtgtgtgtgttttactttaatatgaattatacaaaatactagttgttttacactctcttttcttattcttagggcttttgtgtatgtctgacttgtttttaaataacttcctcagcaatgcagaccttaatttttatatttttttaaagtagctaacatagcagtaggcacttaagcatttagtcaatgatattggtagaaatagtaaaatacatcctttaaatatatatctaagcatatattttaaaaggagcaaaaataaaaccaaagtgttagtaaattttgatttattagatattttagaaaaataatagaattctgaagttttaaaaatgtcagtaattaatttattttcattttcagaaatatatgcatgcagttatgttttatttgattgttgacttaggctatgtctgtatacagtaaccaaataaactctttcactattaaagagatttcttactga

SEQ ID NO: 686 - DNA, 31379 bp, Homo sapiens
atctgaaaaattaataattccttaattatcaaatatccattatttaaatttataattgtgtcataaatattgtcataaatagatttgctgttttaaagcttgttccttcattttctctgttttgttttagataaacattgtcataaatagatttgttgttttaaagcttgttccttcattttctctgattgttttgttttagattcagaggttacttatgcttgtttgttacatggatgttacatgtgtaatgggggatattggacttctagtgtactcatcacccatatactgaacactgtactcaaaaggtaatttttcaaccctcatccccctccaacctccccccttttggagtctgcagcgtctattatgtccacctgtgtccatgtgtacccatggcttagctgccacttataggtgagaacgtgccgtattccctctccattttgtgtgtgtaatttatttctattgaataaatcaatttgtttgtatttcagattcccctgctggtttgatgattagagaatagttgcacttgtttcctttattctctgttttccctgtgaattggtcattggatataaaggccccattcaattcaggattttttgttttggggttttttggtgggggaaaggcaggatattttcttgctttcattgtgtcagatcctatcattttcagtgcagtttttaaaagctaacttttctattttctcttacctcatccttgcctttgttttgcccacaccttctatctgcaagtaacccatattaaaaacagagtgcataccctttcatatttttctccatattcacataggtatctttacatatgtacacagagtttgctttacaaaaatgaggtcatggaaagccttccaagtcaaatagtagagctcgagtttgttctatttagtggctgcaaaataatattccactgtgcatatgtaccacaatttattcagttatctcactactagtgggcacttgctttgctcccagttctttttgccccatcctgttcatatacacttatatacatttatataggatagaatcctaggagcaggatttttgtctcaaatagtagctttttattttaacagattttttttctggacagctttcaaaaaaggctgtagcaattcacatatccatcagcaaaggataagatcgccctttcccccacaatcttaaatagtctcaaggagccagcaagaatcaggggttctccaaggagaggggaaagtctatgagattccttactcagcaataaatgagctaacagtgaattattcctcaatagaaaggcccctttctattcatctttggatctttttagccaaataggcctcacacagaaccaaagcccagaacaacccaaaacagggtctgaagtccagaacaacccaaaacaaagtccagaacaagccaaacaggatctgaagacagttgtctctaactcactcctccccacttcatgaatccccgtgagttctttcccactggatagtacttgcatattacacaatcagctgcatctagcatctgctcttaatttcatttgatattttatcatctcagttaagattctgggaaaaagaagttgccttctttttgaaagggattgaaagaaactaggaaacttggcaggaagatcattcttaagccaggaaaaaaatttttaatgctcacatgtgaacatgtgatggtcataccagaaggagcacccacctccctccctctgtgacagacacattttcttagccttcacctttccttctttcaagttgctgaaaatccacagtgtttctgttcatttgttactttcattctcacctatcttctctcttgctccatctaccagaacaataattccccatataatacttctcacttcacttttcaacgcaggacctcttgttgggtaagctaaaaggatatgtgctctgtaaataagaaaaatctttattcaaagaatctatcaaatgttcccatgactccatctctatttgtatatctaaagattgcatagtagagaaaaacaaaagattagccctgcttcatcttacagctgggagagtcatgaaaggccaaatgggtaacaaagctcctggttttgaccaagcctagccaaagaagctactcaaatgtcaaaggcattgtttgtataaaaagggaaccaaagtacaggttccctttacagtagaaataagagaactccctgttgacaaagggaggaggaagaaaatataaagtacacttttaaaacatgaagtcttcatagcagcttatagtcgttcagagaaacatgttccactgagaatgacttgagagagaggattacatcattatgccagaaggaagaagccactgtgcatgctctatcaccagcctcaccctcctggtcagccttacaagagtgacactggatatactccagaagttggacccaccacagcctgcacactggagtaagtgctttcctccagttgaagctcatcttagaatgatctgtgacttagaccatccccagaatggtgtagttgcaggaagcctaacgtatgtctcctgagacagcctcagatctgagtttcctccttatgttttggtatttggaaaggggtggagaagatactcttgggtagaagtatgggaggcatacagattcagaagaaaaaggataactctatctttagtgtgttgtctgtggtggcatctagccttaccactgtatacttacattccacctacaaacattaaaataaaatgcacagtgcactcctttgttttaaaaaggaactaggaaaaaactcaaatggcaatttggttccagattttttttttaatgtgatctttgatctgaagtcaatgtaggatgagttctgaacaaagtagcactttcaaaggttgtatattaaagaggtgaaatgaaagacaacttggcacttgagatatgaatttgaatgtgtatatggttacagtctggataagacactgctaacatgacttcattaactgatcgcctatgtgggaccattggacaaggagagggggtgttctggctgtggtgccatatactgaaactgaacccatgagttgggcccacaggaattgagggacaagccagatagatggcaagaattctaatttccaatatgcaaatcagtctaaacatttgactttttttaagtctatttggaaagtttttgaaacacggctgcactaggcgagttcattaagtagcaaaattttaactattgttataactttttctttgcccttttcagttaacactgcatgaccacccaggtgcatgaggctctcttctcctcttagtgacaataacaggctcacaggaagggttcagtattaattatttataccttacttcatgtggctctaagtcaatgtattgtctatgaggttttatatttaagccatacttatgaaatgctaaagaggaaaaagcatatttagcacatttggggcaccctaaatgtgaacctgagtaaatttcagtttgtttgtttgtttgtttttgtttgttttgagacggagtctcacgctgttacccaggctggagggcaatggcgcgatcttggctcacacgcaacttggcctcccagattcaagagattctgtcttagcttaccaagttgctgggattacaggtgcccaccaccatgcctggctaattttttgtatttttagtagagatggggtttcacgatgttggccaggctagtctcaaacttctgacctcaagtgatccgcccgctttggcctcccaaagtgggtttgttgttcttttaaagaaaaaagaccactacttattttaaagggtgatagcagtgtcctgactctacctagacagatatgttcattcatgtgctcattccagttgaaccataataactgcaattttcaaaggaggaatacagagtctgggaaatcagaagagtatagcaacaaactggtatacgaggaaactgaaaatgaaaaatcagcaaagtggtatttgtacctgcctgagtggctacagtggtgaaggtgaagggtggcaggctagattagcaccatctcctcccctcctcgcctgcggcctcagtactttccactgtggtcccaggatacgccaggtcaactgtgatcaactctgacacagacaaactctgggaggggaggaggcatcctttcctattctcagcggtctcagttccagagaccactttagtaagctctccttgtcataccttaaaacataaattaagacccataagtaattccaaaacctcattttattatgttgtttttatctccttgctcgcccatcttaaaaaaaatggtaacaccaatctcagagactgatttctcctacttattctcttaggagggaaggagtgttaaataagccaaggcatgctaacaggaaggaaaaaatggagattatgaagaataatcacaatttgaaaactattaaaaccacgcaccaggcagtttacaaaatatttatttctttgttatattatttctgctgctgaatttggtcaagagattgtactaatcataaaatgaatgttattgatcattttaaagtctcttctaaaagtagctaaatttatactgctgattccttttgaaacatgcgacctacagcttcttggcttttatgagctattcaagagatatttagtcatcacgttgtgtcacaatgggagtgactcacagagcaaggagagaacctgaggattcctcacacatgtagtactcagagctctacggaaacccaggcacctcgacctcaagaggatcagcctggccagggtggcacaactcttccttccccgtgcacagcaggaaagctgccatcagctgagcaagtccaccaacagtttctgtgtcccacttcatctttaataaggtaactgatgacagttttgtcatttattcttttatttatcaagtcaatctaaactttctttgattttcctcactcttgcagaatgaatcggtggtctttcaagctgtggtcaatgttgctacttcttttaatgtaacacattagaacccagtgatgggagctgggtccatctcaccatagaaatgacctcggtgtgacctgggatcttgccttgaactcctccaggactctctttgaatgtcctttagcaccctagtgtcccaattcaattcatattttattttctctgtgccttcttgacactatctgtgaatcttatgattaattggaaactggagggggaagtctccaaaaagcacaggattcttagatgagtttcttactgaagcagcagattctctgtcaactgcaggtctgatctgtttgtctgtccgctttatcaatattatcagatgtaagtttacatgaatacacacacatattcactaaactgaggggaaaaaatgccttgtaggtcataaaaaagcagggaaattcccaacaattcatatttgatccctggatccaggggtggcagcaataagcctgctttagatatttactccccattttatgatccggtggtttggtttttcaaatgatgatatggctcctttcgcaatgacttgatgtttaggaggtgtgcttcaataaatacattttaaaatcaacaatcaagttagagttgtacaaatggctctgaaatgtcccactacactgttagaccaagggcacagattgtgcttctgtactatttatcctagtatccctcggcatatattaactgctctaaaaatctccttggctacacgctgcatcaaatcaaagttaaatgttataccacctttctattctatttttaatattcaaagagggtgctcagattttagaacaaatttcaatgtttaagtacacacaaaaaaatcattaactcatatatttcaagagtaggaaatgggaactggtgttaaaactcttataacaaatgtcactgtcttaagggacagtgtttaaaaacgcatacctggccgggcgcggtggctcatgcctgtaatcccagcactttgggaggccgaggccggcggatcacaaggtcaggagatcgagaccatcctggctaacacggtgaaacctggtctctactaaaaatacaaaaaattagctaggcgtggcagcgtgcgcctgtagtcccagctacttgggaggctgaggcaggagaatggtgtgaacccgggaggtggagcttgcagtgagctgagatcacgccactgcactccagcctgggcgacagagcgagactccgtctcaaaaaaaaaaaacaacaacaacaaaaaactcagaccttttcttctgctcaaagatcactgtggctgaaatatactgaagttttaaacacacttttggaacctatacatatgttctatgttctaagctttccttaaagccttgtgactacaaatgataactgtacacaacatataatctttcccagatagcaattgttatgcagtgaccataaataaagtaatcatagctttaacaataatttgtaacctgctaatactgtcaggaaacattgtcaaaataataaacctaggagggacttgggataattaatgaatagttagggatgtgatggtgaattataatttaaacgttttgaaggaaggcaaaagaaaatcagagatgcttttatccttagaactaaaaatgcaaaatgtaaatccagcagatcttccctatttgaggcagttggtacacctctgctaggagggagggaagctacatcctgaggaggctgtctgagtgaatctgtagtggaagtacacacgaactccatgcctcgctgtcccagtacccaaagcacagtctggctgccaaggattacctcctgccctcagggaagcaggaatcaagggcaaatgtaactaaccagaggaggagcttcttcatccattgagtaagggaacttaccctcccacgacgataaataccaactcaactatatcatcagcagcataataattattataattgttatttcagtcagactctcaaaaaagcattcgttgcttaatgcaagcacatttaatgtagggtcccttggtgccattaaaaaatttttttttcagatttctgggtggaccatttgaacacatttctcacagaaacataattttttagtttatgtcaataggttccagtgttcatttttttttaagtgtggaagaaatctctaaaagccacctgggttttttttttttttttaaacaaaacaaaacaaaaaccagtttttttttacttcaatgaaaaggaaaaaatgaaaaaggaatgttgtgttaagtcaaccgggtttacaatattcaaatatacaagaggcatacatgttcagtggctttcagtattcagaaagccatgcaagagaactccaaaaagagaatactttagaaaatcattgctcaatgttttctatttgatgtattttggtaaacaacatagttgttgattcaacttgggccacaattgcaacacattggaagtaaataaagattctacaaactcctgacagtgtggttgactagctttggtatcgctttctaaaaggaaacacttcatgaagttatgtggaaataaaatcaactggtctgggaggaactatctagaaagaactctacattgcttataaaaagtatacctcacaataatattgagatattttctgttcttttttttaaactgtgtcatttatttttaagaaacagaggaaggtgaataagagaagtgaaattaaataatcctattttaacttttttactaggaaaacaaactcaggaagaaaaagaaaagcagaagtgatcaaggagagcgctcgagttgcaatattttcctttggctgctgacaggcagttactataaagcattgtgcatggtgtatgaaagacaaaactagttctcctttcttggtttcttttgaatctttgtgatatggtagagaaagtttgataaagtgttcttgtgcctgctgtcgactgataatgtgttcatctctttgcagttcttccttctctttcacacagtttagagttcagagagttttagttctggtcactctctggcaagtgaccatagttatgacctctactctacaccagaaatatcttgacaattacatgagataaatattacataaacacttcccaaaactttgtaatgttatcaaaattggaagtgtgaatattatgtattattataattgctatcatccttttgccccagcgattcagaggtctcaaagattaatccaattatcactagaactctggagctacagtggagacttccttctttccttccttttttccttctttgctgtacaacatttactaaacatcaacataatgccaagtatcatacaaggaactggtaatgtagagaagtatatgcagagcccagagttgagtgggaatacagactgcagtggtagaacagaatggtctgggtatcagtcccggaattgccactacaactgtagctggagccaattaaacagagcttctgaatgtgtttcctcctctatacagtgaagataattttgtcgtaaggtgtaaataagataaatatttatagatcctaggaaacggcctacaacatgttaggcactcaatgaaccatagcagttattatcattcctccctgacttggtcaaccaggaacttgagaatcatagatttgctaggaggatattttgaattctgtagggtcagttggccacccaccaaagggtacccccagaggagctgggggtcaacagcatggggtaaaccttgagggagggaacagatgggaggtgattggatgaagagatttgggtgaggacacagagccaaaccatatcagcctcttatcctcctgatgacaaaaagacattttaaaatatttatatagagggaaattaatgcttgcagcagcaggatatgagtaatttttataagtaacccaacttttccatgaggccattaaaaaaagaaactcatcaatgtgatactaccaaggaaccaatgactaagtttccagaaaagtagttctagtgctatgatattctggactcccaacactaggaagttctagaacagtggttctaaactgggggatattttgtcctccaggggacatttggcattatctggagacatttttggttttcacaacttggggaggggtgctactgctgactagagagtagaggccagagatgccactaaacatgctaaatgcacaggactgaccccacaacaaataattacctggcccaaaatatcaaaattactcagttagaggaatcaatgcctaaatatgagcaatacatagagcagactgcctcataaagtgaaagtgattcaccctgccatgaagataacaaagttcttactgtaacggcagacattaggtcacttcacccagtactctccaaggtagatgttgtatttctactttacaggtaggaaaatggaggctaagaaaagttaatttgtccgagggccctctgatgatagtgaaactgggatggaacctctgcctgcttgcttctgaggtctgggctcctaactactgctctactgcctcgagccaagagatttacgccctattaagcaatttgttgtgcgataaattggaagacacagcagataagcaaacaactcaagcaaccaggtcagttcctggagtttctgaattgttgggaccaaggggccgtgcagaggtaaccacagctggcgtagtgtggttgaggtagccctattagccttttagttgctgttactaatttatttctcagtggtcaatgaaccaattggccatcaatcagctttgtgtataggtcatgttcccatggctctgacccaggttgctgctcagagttggcatcgtggctaaaatattactagaggtcaaagatatgtgtgtgtttgtggttgatttagtcgagtgatctagaggaatctgaaccagcatttctgggcaataatacttgagttaaggagagtgtagcaaaactctaggttagcattggcagtccctaggattcagactgtaggcctaaatgaccctcagtccagagctgtacctaatgaggacaatacattttaatgtgagtccattcttaacagcaaaatttcctctttgcttgtcaccagggaaaaatgggtttgcatagaaaaggtggagattgagggggaagcagaatggacaaggagtaaagagggaatccaactacttagatttgagctttcgttcttctttggtagttgtagaggtgagcttaccaaagcatagatgacaggcaatgtggtatacaagttactacactccaaaagtctggggttcttacttattttgtgcatgacatccaaagtagcctaataaaatcttttcacagaaaaaaaagctttactttcctttgccaaatttttaactttttattctgaaataatttcagaattattgaaaaatttagagactaggacaacccagattcctcaaatattaacactttaccacatctgccttctcattcctctctatatacataggtgcatgtgtggttttaatgtttatttatatacatatcattattattttcttaactgtttgagagtaagttgaagacatgatgctccttactctttaaatacttcagtgtgtatttcctaaaaagcaggccatgttctacatcatcacagtataattatcaaaattgggaaattaatattaatgcaatactatttatcaaattttaagatcttattcaaatttcacttgctggcctaataatgttctttctgaaaaaagaaaaaaaaattttgatccaggatcacatattgcatttggttgttgtatctcgttggtctcctttgatctgaaatggtcctcagtatttcttttacttcatgactttgatgtttttgaagagtacagccatatatttagaagcactggaagatgtttccccatgcataattagctttggatgctccacagaagagctgttgtgtccttccctgtgtgccatctcagggggcatgcgatgttggtttgttccataactagtgatgtgaatccttatcacttggttaaggtggtatccgtcagatttctccactataaaattaccattattctctctttaatttgaaagtatatgacagggagattctttgagattctataatgactgtctgtcatcggaatttgacccactagttttagcatccattgatcattcctgcctgaaaccattgttgctatgtcagttgccaaatggtgatattctaattccatcattcgtctgacacttattagatggcatattaattctaaggaaaaatttccatttatccttatttattgattgatttacttcagaatggattcatgaattcatatctgatttaatgagttattacccattatcactattggctttgatgctcaaattgtctcttacttcgccagtgggagccccttccagctgacatctatgtactagtgatgtatctccagcattcgttgagcacttacttacttgtagcataagatgctccaggcttattttgtacattcgcctccaagctcagccctgatgttagcttttccaaagaacatgaacacaatgtttagaaattggtttctgagcccttggtatgttcattgttgttggagtgtcattgtttctagctcatcgggtagatctagaaagttacctatccatttttgtatttactgactcatattaaaaaccaggagttcatactgattcttccaactataatcccactccacagagttcattccagcctctcctttttcatatttgctactcctccttctgacagtgtgaagcctggcttccatcatccacagcttagttacagttgacccttaaacaacacagggattggggcgccagtgccccattcagtcgaaaattcatgtataacttttgactccctcaaaacttaactcacagcctactgttgaccagaagccttaccaaaaacatagtcaattaacacatattttgtatatgtattatatactgtactcttataaactagagaaaagaaaatattattaagaaaagcataaggaagataaaatatacttactgttttttaagtggaagtggatcatcataatggtcttcacccttaccatcttcatgttgagtaggctgaggaggaaaaaagaagagaggttggtcttattgtttcaggggtggcagaggctgaagaaaataagacataagtggatccaggcagtttggatccaatatgggatccaacagcccacgttgttcagatgtcagctgtgcttattttctcaatcaaataatttgaaataatagggttgtctgttttctagctctggtggaggcttggattttatgtgattctatttgttcttctctttgaattgtgcatagtttttggagtacgtcctaggaaatttggattgacatgactgtcactactacagctacctcagaagtgagaataacttttttaacacttgaagtgaaatacatagtattacaaaagaaaactactgtattgaaatacatccaaatatttataagtttattttattaacatggtggcaggaacaataaccaccataattttgaagtagtaatcagcattaatcatattttgagataattccaacaaatgcaatgtaacatgaaaatatttattatttctattggtaacaaaatcacaggcaatacaaatactactgcggtttgttgtttcttccgtaattgaagattgtgctaaacttcaattacagttcaggaaaaaaaaaaagatgggatctttttcccatccaaatgtagaaacccctgaattctatccacagactctctcaaagttctaatggcacccttttgtctgagaagctttcatagatgcccaaatcatccatccaactgaattcaatcccttaggggctggtaacccagtttcatgcacaggaacatgcatgaaacataccctccttgtggcttcccttcccccattccctcatctactttcccctctgggaccttgtgtcagttattatactataacagaggaggttatgaggggagatgactctgtagccacaactatttcagatgtcagatgttgcttttggccagtggacttttatccctgcctctcagcaatcatggacaagatgtgaagtgtcgaccttatcaactcagcttgtcagcttggacacttctcagcccagcccagagtggagtgctccagtccccagagcccctcatctgtctcctatagtggaaggacacagcactctagtcccagtgaccttggcaaatcactttgttgctttgagccagtttctaaggcaaataatatgccctctctaactcaaaacgctattgagaggacaaaatgagacctgtgtgtgaaagcacagcatagagtgccttactaatgtatgacattattttactgtgactccctcgtgcatgcccctggtaaaaatgacaacacaaaaacttccaactctctgctctagagaacataaaaccccacaaatatttgtcttcttcaaataattcccctgggagtttagactgcaatgaaagctgcagaatccattcagaaaatatattaaacatttcgcctttcggtgattatttactgaagccagatttgagcaaaacgctatattagttgaatttgtagatacaaaatttccttaaaaggtttaaacatgtaattttgcaagagttagttataccacttcccctcccataattatacatttataatgtatttgagaacgggaaatcttgctacatggacattgatttgcaacaaattataactcttacacagaaaagagttggaaaaactataccaaattattaagccatggtaatctaaaaagttgactacttcagaaatagctgtagctataccacaagaatcaagtaggttctccaaacatatttttatattcctctgacttaatttttatcaactgacttttttttttttttttttttttttttgtgacagagtcttgcactgtcgccagggctggagtgcaatggcatgatctcggctcactacaacctccaccttctgggttcacgattctcctgcctgattctcctgcctgattctccagccctagcctcctgagtagctgggattacaggcaccctccaccacacccagctaattttttgtatttttagtagagatggggtttcactatgttggccagactggtctcaaactccagaccttgtgatctgcccccctctgcctcccaaagtgctgggattacaggagtgagccaccaggcccggctgaactgacaattcttttatcattttttttttctttagctatagatcttctgggggaagaaagataaaagcagagcccgaaattttcttgagaagtgaagaagacattacattgattttttttaatctgaaatagtctgtttctcaaacagcagtaaaaatagtgtgtgtgtgtctgtgtgtgtggtgtttaaaattctgtgtgtatgtttatatttcttgatctagaaagaaaactttacaaatacagaagaaaatggggaaaatgcactaaaatattgaatcaagtgttataatcattactatcttctttttttctatgttttttcttgaggataaattacttttacaagcagaaaaaaataaatgatttttgaaaaggattcgaaggaaaaattaggaaataattgtaagaaaataaagtccaggctgggcgtggtggctcacgcctgtaatccccgcactttgggaggccgaggcaggtggatcacctgaggccaggagttcaagacaagcctggccaacatggagaaaccccacctctactaaaaatacaaaaattagccgggtgcctgtaatggtggcaggtgcttgtaatcccagctactcaggaagctgaggcatgaaaatctcttgaacccaggaggtggaggttgcaatgagccgagattgcaccactgcactccagcctgggcgacaacagcgaaattccatctgaaagaaagaaagaaagaaagaaagagagagagagagggagggagggagggagggagggggagagagagagagagagagagagagagagagagagagagagagagagagagagagagagagagagaaagaaagaaagaaagaaagaaagaaagaaagaaagaaagaaagaaagaaagaaagaaagaaagaaaataaagtccaaagtctataaactcgcttggcctctcagttcctttttgaactcagtgtccaggaacagccatgattccaaaagcacccacaagttctgaacttcaactcagggcctattgattgtcctctgtgaggcattttaaagcccctctggagtctcagggtgggtcaagattaagggcaaagatattgcgtggacacaggaggaagctttttgggtcatggaggaagaaaataaggtctttcccacatgtggttctctctttagcccctctcccttccacaggctcagagagccaacacagacctgctcctctgtggggagggagctgatgatctcattctcttgggctgccccatcactgagtgtggagggctgggcccatggtactcagacctgaggcagctggccatacagccttggcacccaggcataaacctcaggttcttgttcacttcctctttctggatggcttgcttttctctggcaccagtaccccatggtaagagtaatatatgctgaggggaaacgcagatgcaggcttctgaagaaaaaggaaagaaagccctctacctgcctgattttaggccctaggctacctctagccctgacaaaattaattttccaagtagttctgctgcacatatggtcaaagcttccgttttacagcatacatttgcttggctttatcctttgtccatgtgatttttttctcacaggagactggtgttcacagaagacagaatttggggatgtgggagtctggtttgggacatggtgcattggccagcatttccctctcagtcacttcccatttatcttgccctttcttggtgaactcacttgttgcctcccactttaatactcatctgcattggggtgtaatgatctcagagttgggttgaagattgacattaacccatttaaaataagaaaatggaagccaagttgggaatatcttagtggcaacaaaaaatgctcttcttctcctgacagtttgaagataattgggagtctgacagaacaattaaaattgaattattgtttctaatagattttaagcccattctgcagtggaatttcatgaactagcaagaggtaagattttactgtgagggtctgtcttcctgatagacgagttcactcctgagattaataccatcactccacatagctccagctggccgtggcaactcaatggcttgtgtcaattttgccatggctcccctctccctctcttccatttaatttctctgaatactccttggttagtttttgcattactttagaggaacgatttatcatttagatggccatcttcccaacaaacaaccaaataagagttattgtttctttaactttctatttatccacactaatgcattaaaatatctcaaattcatcagtcctgggttataatgccttggtagttctaatttgaattttctttttcactttgaacactcaggacaccatcttcttgtattatacaagaaaggagtgtacctatcacacacagggggaaaaatgctcttttgggtgctaggcctcctaatcctctgtggttttctgtggactcgtaaaggaaaactaaagattgaagacatcactgataagtacatttttatcactggatgtgactcgggctttggaaacttggcagccagaacttttgataaaaagggatttcatgtaatcgctgcctgtctgactgaatcaggatcaacagctttaaaggcagaaacctcagagagacttcgtactgtgcttctggatgtgaccgacccagagaatgtcaagaggactgcccagtgggtgaagaaccaagttggggagaaaggtgagagacatggaagtgggtaggatgggacagggataggggatagggaggtaaccaaagctaaataaaacatgctcaagttttaaatggcctttcgagaaaatgtttcctaaataccggctgtgtacttctctaatcttaggatagcttctgagtagttccaagtacaggctgtctgtgtgcatgagaaacacagcccagaagacccttgggcctaagtctcagtgggtgaattcagggctgagatgaaagtattgactttccatggtcttctcctgtaaagggctattctcccctgccccatatacagcaaaggaatttagactaaaatgtacaggagaatatgggggcaattcccaaattgccatctggatacctggcacccacttctccctgcaaaatgattctaaagctcacacattttcaatgggcaaggttgaaaatggcctgagaatttgagtatgagtgtcttacatagttaaggtagagtagtgagcctttggatgtccattctgcaatagattctgctatggtgactgtattctgaactagaagaatttttattggctttgaatgaagtgtgaaacattctcatggattaagatgttaggattcacaaaggaaaaaacaaatgtttgcgattttttttctagcacatcttgatcatgtagctgagactctgaagctcaaaagcaatgatttgataaggcttcgatttttaacacttgaattccaacacctttaaaaatactaaatgtttcccattttaaacaagccaagtgaatgactgaattcttaaccaaaaataaatgtgaagtagattgatatcactctttgtccatacagaacattatataaatattctctggccttactatctagcaaggcaggaaaaatagatcaatttgttctcactcataggtgggaattgaacaatgagaacacatggacacaggaaggggaacatcacacatcggggcctgttgtggggtggggggaggggggagggatagcattaggagatatatctaacgttaaatgacgtgttaatgggagcagcacaccaacatggcacatgtatacatatgtaacaaactgcatgttgtgcacatgtaccctaaaacttaaagtataataagaaaaatagatcaatttactctacatctgagattaaaaagcagaaagactcactcacagagtttcagtatttgacattcagaaccagaaatagagtaacagcgagaacttgaactatttcagtttagcctcccaccctctctgctatcacttcccaaaactgcgaagtatttcagagtaggaaaatgacttcaaggaggaaatggcaccattgtgcaaagcaggggctgtattttcatcaaaggtggcaaataagtactgtcttaccacacctcttttccttcctctctgttctaggtctctggggtctgatcaataatgctggtgttcccggcgtgctggctcccactgactggctgacactagaggactacagagaacctattgaagtgaacctgtttggactcatcagtgtgacactaaatatgcttcctttggtcaagaaagctcaagggagagttattaatgtctccagtgttggaggtcgccttgcaatcgttggagggggctatactccatccaaatatgcagtggaaggtttcaatgacagcttaaggtaaatcaaattaatcaacttattaggaaacaatagctgcaaacgtttactgaatgcttatgtacaagacatcctatttagtacctttcaaaaagtctaccatatttatctctaatttttgtgggtacatagtaggtatatatatttatggttatatgagatattttgatataagtatacaatgcatagtaattacatcaaggtaagtggagtatccatcacctcaagcatttatcctttctttgtgttacaaaaaatccaattatactctttgagttatttttaaatctgtgataaattgttgactgtagtcaccctgttgtgctatcaaatactagatcttattcattccatctagttatatttctatatttctgtaccccctaaccattccctctcacccccactaccctctcaagcatctagtaactatctctctactttctgtctccatgagtttgttttaatttttagctctcacaaataagtgagaacatgggaacttcgtttttctgtgcctggcttgttttacttaacataatgaccaccagttccatccaagttgttgcaaatgacaggatctcattcttttttatggctcaatagtactccattgtatatatatactgcattttccttattcatttttctattgatggacatttaggttgcttccaaattttagctgttgtgaacagtgctacaacgaacatgatagtgtagatatctctttgatatgtttatttcctttcttttgggtatatacccagcagcggtattgctggatcatatggtagctcaatttttagttttttgagaaacctccaaactgttttccatagtggttgtactaatttacattcccaccaatagtgtacgaggattcccttttctcacatcatcatcagcatttgttattgcctgtcttttgtaaatatgccattttaactggggtaaggtaatatttcattgtacttttgatttgcatttttctgatgatcaatgatgttgagcacctttcatatacctattttccacttgtatgtcttttcagaaatatctactcagatcttttgcccattataaattggattattagacttttccccatagagttaagttccttatatattctgatttttaattccttgtcagatgggtagctttcaaatattttctcccattctatgtgttgtcttttcacttttttgattgtttcctttgctgtgcagaagcttttcaaattgatgtaatcccatttgtccatttttgctttagttgcctgtgtttgtggcatattactcaagaaatctttgcccagctaattgtcctggagagttactccaatgttttcttgtagtagtttcagagtttgaggtcttagatttaagtctttaatccattttgatatgatttttgtatatggtaagagattttgtatatgcacaagagattcttctgcatgtggacatccagttttcctagcatcatttattgaaaagactatcctttccccaatacatgttcttgacacctttgtcaaaaacgaatcattgtagatgtatggatttgtttctgggttctctgtcctgttccattggtctatgtgtccatttttataccagtaccatgctgttttgtttactatagctttatagaaaatttgaagtcatgtaatgtgattcctccagttttgtatttgtccagggtgtctttggctactctgggtcttttgtgtttctatataaattttaggattgttttttctatttctgtaaagaatgtcattggtattttgataggaattgcattgaatctgtagattgctattggtattgtgcacattttaataatactgattcttccaatccatgaacatggaatacctttccactttttgtatcctcttcaatttcttttatcaatgttttatagtttttattgcagagagctctcatttctttaagttaactcctaggcattttattttatttttaacttgtaaatggaattaattccttgatttcttttttggattgtttgctgttggcatacagaaattgtttgctgttggcaatagaaatcttttttggattgtttgctgttagctactgatttttgtatgttgattttgtatcctgcaactttactgaatttatttgttctaatagtttttatgtgtgtggagtctttaggtttttccaaatataagatcatatcatctgcaaacaaggataatttgacttcctcctttccaaattgggttggagctccattgtatgttatttgtttttgaggaatctccaaacaaatattgctgcttttaagatcctttctttatacttgacctttgggagcttgattaataaatgccttgtggtagtcttctttgggttaaatctgcttagtgttctataactttcttgtacttggatattggtgtcttcctctaggtttgggaagttctctgttgaatgaactttctaccccatctctctctctctctccctcctctataaagccagtaactcagatttgcccttttgaggctattttttagattctgtagctatgcctcattcttttttttttcttttgtctcctctgactgtgtgttttcaaatagcctgtcttcaagcttactaatttttttattttgcttgatcaattctgctggtaagagactgactcattctttattatgtgaattgcatttttcaaatccaggattcctgcttgattctttttaattatttgtctcgttgtcaaatttatctgataggattctgaattccttctttgtgttatcttgaatttcactgagtttcctcaaaacagctattttgaattctctgtctgaaaggtctcatgtctctgtctcaccaggattggtctcttgtgtcttatttcattcatttggtgaggtcctgtttttctgggtggtcttgatgcttgtggattttttttttttatgtctgtgcattgaagagttaggtatttattgcagtcttcacagtctgggcttgtttgtactcatccttctggggaagtctttccaggtatttgaagggacttggctgttgtgatctaactttttagttcctgaagccatatcttcattagggggcaacccaagcccagtaagaccgtgcctcttgtaggctcatagaggtaccaccttgatggtcttggataagatccagaagaattatctggtttaccaggaaaagactcttgttctcttcccttactttctcccaaacaagtggagcttctgtctatatactgagctgcctagagctggtggaagagtgacacaagcactcctgaccaccatcattgggactgcactgagtcagacccaaggccctctgtaatattgcctggctactgcctatgtttactcaaagccctgaggctctacaattagcaggtggtgaagccagccaataagacttgtgtccttcccttcggggtggcaagttctccctacccttgggtgaggtgtccagagatgccatgtggaagccaggggctggagtcagaaactttaggaatctacctggtaatctattctactgtggttgagccagcatccaaaccacaatacaaagtctttcccacttttccctccccttttcacaagcagaggagtctctcaccatagctactaccacctcaggcctgcgggaagtattgcctggctatgaccaatgtttactcaaagcccaagggctcttcaatcagcttgtggtcaatgttgttagggttgagactctcatttcagggcactgggctcccctctggcccaggataggttgagaaatgccatctaagagccaaggcctggaattggagacgctaagtgcccacttggtgctctaccccactgtagtcaaaccaagctggcacctaagctgcaagacaacatctcctttactcttccgtctccttttctgaagcacaaggagtctccccctatagccatcatagctgggaatgtcctaggtcacacctgaggccagcatgtctctgagtctcacccaaggcccatggtgagtaccttgggtattgctcctgatttttcagggcccaagggctctttagtcagcaggtaatgaattttgctaggactaatttcttcccttcaaggcagtgggtttccttctggctcaggacaagtctagaaatgttgtccaggaggtagggcctggaataggggcctcaggactctacctggtgccctatcctactgtggctaagctgttatccaagtcacaagacaaagtcctctttattctccccttacctctcctcaagcaaagggaaggagtctctccaagagctgtgggctgcgcggtctggggctgggggaggggtagcacaagcactctcctggctgcccaagctggcatcttactaggttgcttgccccccaagtccactgtctccgagcacagcaccaggacttgcccaggaattgcaatccttgtgacctggactgcctttgaagtttatttagaaccccacagcacgttagcccacactgttgaggcttgctggcactcaggttccagctactgaaatgggcaattcctcctccggctagggctggtttgaatgctccctctatgggtgctggctgagttctgcctggtgttgctttccactgtgacagggcagcactgagttccaatgcaaagtcccacaatcactgtgctctccctcccaccccaagtacgcagattctgcctccatgccacagagttgctgctggtctatggaggaggagtagcatcaacaattcaagactgtctttcctaccctcttcagggcctctttcagtgatatgaagttaaagtgatataaagttagggactgtgatcactcatctgatttttggttttatgaaggtttttttgcatgaatagttgtttaatttggtgttcctgtggggaggatgatcaatgaaggcttctatttggccatcctgctccacctctaccctatttagtactttaagttattcccagtgtatagatgatgccactaaaactaaaagagtttaattaatttgcgcaaggtcacccagctggtaagtggcagaactgagatttgaacccaagtttaactcctttttactttttgccttaatacatgatgctcagagtggcagcgaatttatattcaactggtcagtttgtcagatatttagggaatcatatagaaaggctagatcagaataggcttctccattggtttactgtcagttgcagacacaacagtaccaccctatttaaaccttcagtagaaaaccattagttcttaaatagcttctccaagcatgctgtccaagctttatagcttcattccgtgggagagactgggggaagtgtgcttaatccatcttacctggaaccagaacttatcaccatcagttcaaatcccctaaagtacaagtggttctttcagtcaagattctggcaggaaatggtggcacattaaaactgggtaaaaggcagagagtatgcttaaaggacttataaacatgtgtgaggtatctactgaaatctcaaaggatacaatctaggggctaatgacagtaggtgtatttctcttcagaggactgaagggacaaggagacagggcagtttccagaacctggagacgcagaggctgttgttttcagttaagggataaaaataaccagtgttgacaccacaggaggataactactctgaccccctcacctctttcctgatcccccactggcactttcaatagactgaactcaacagaagccagagtatacttagtgcaggtaagattcccaggatatgatgcagacagagggtggaggaaaggactagagaagcaagcggaagatattcagctgagtggtgccacaataggcaagtgagaagacaaagttagttatagtttttcctttgattcatccatttatttatttgactattatttgttgaaggcatatgttagagtttatgatttataccatggacctaggtttagtttactaataaaaggttaaaattactccactgaaattaataaagatagagcaacttcattttgccatttgatcaggttgccaagtttgattctcctaggaaataagcacaaaaatattggaacaattcttccaaaaaactaatgtgcatttgaatcacctggggatcttttcaaaatgcagattttgattaagtggatctggagaggagcctgagaccctgcatttctaacaagctccaggtgctgcccatggttcagggatcacactttgagtagcaaggtcataaaaaaacctccattggtctctttggttgacctttgtttccactctacaaccagcagtatcataataaaattgtagtatatgtaattagagatttactcacttttaaaaaagatttcaactgaagggtttgtgagctttgccatgcaggtatgccatgcctaatagtaatcaataaagagtatttttcttaaatgaatcatggaactagtattttaaatggtgttatgtaggtgcgccacaatccagtgtcagcgtcacaatttctatatataggagggtttaggggcagcagtccatttgagagagggttggggctccttaaaactgtattttcccagcatgcatactgatttaatatggtttttacttacctggtaagcttagttggagggcgtaaggccacttgtccctagtacgttatttttatgagtgggtggggagaaaagtcttcctaaatagcctcttggcactgctacttccacaatctagaggaaattgggcaacaggtgaataaaacaaaagtaagttgggaaataatcttttttaattttagtacaagtcatataccttacagaatatttcaaggtcaagctaacttgcatttttagtaaaatatatttcaaactttacaataataacgttgctagaaagcagaacctaagaaaaaataaattacattttaagtccactaatagagcttttaaaaatcttatggtgaagagttttataaaatgaataaatacttccttatattatatattcctggtaggaaaataaatcaaatttaggaaacgactattcatatactggtttgctgtacaggtggtccctgacttgcaatgttaaacatgacttttcaactttacaatggtgtgaaagtgagatgcatgcattacaaacttttcttagaatttggaattttgatcttttaccagcagcaatatgtacaatactctctcgcgatgctgtgcagtggcagtaaaccccagctccccgtcagccgttgcaatcacagggcaaagaactgctatgctgcagggcactgtgtggccagatgattttgccccattgtgggccaatgtaagtgtcctgaggacgtttaatgtaggctaggctaagccatgatgtttgacaggttaggtatattagatgcattttttgacataggatattttcaacttacaatgagtttatcaggatgtgaccccacaggaacatctgtatattggtttgctttaaagaaaggggcaccatgattcctgtaaaaccttgatgcctagggaatgagtaggcttttagttttctgctgcagcatgatataaaataaaataaaataaaataaaataaaataaaataaaataaaataaaataaaataaaataaaataaaataaaacttgctcaacagcatagggagcaggttagtcacatcagggattatcgtattgtgtccttcagcacatcctcatttgtgctgcaatctccttatgttgctagaatggaggtgaacttgtccatccaggctatcattagttcatttcaccataaggtggtttaagtactgataagaaacctgttcataacctgaatgtccacttagtcaatgatgagagcgtggagaacactctaggaagaacaacagtggactgggggtggtgtccacccagatccctttcctgtcctgccgttaactagtcctcacttcaccactctgaacctcagtttcctcacttgcaaaatgaaagggagagagaataagatatttctttcaaatgcacccaaatctgtgattccatgaaaagattcgtgagaaaatagtcactcaaatagcaaatattttctaaacaaacccggattaaacatcttcaatgggttcttttcacagacgggacatgaaagcttttggtgtgcacgtctcatgcattgaaccaggattgttcaaaacaaacttggcagatccagtaaaggtaattgaaaaaaaactcgccatttgggagcagctgtctccagacatcaaacaacaatatggagaaggttacattgaaaaaagtgagtttccgggcggtgccaatgtcctctagaattctttgtcctgaacagcatgaaggagattcaaatacagatgaaataacaaggttctgagtaataccccaataaggatcttaaccatggatcagggatctcctattaatttcagtgtcatctcttgcttctgtttataaacatttactgagcaattacaaactgccaagttatctgctaagtgtcttatgaattatattatttactcctcaaaaactattagagtaatgagcagaggcttgagaaagtgaaatgtcctgctcaagattacacaacacctcctagtcatgcctggacctgagcccaggaaggcaagtcgagccacggtcttcacctttgccatacctcctcttttcctcaagcaccagctgtacacttggcattaaggatttatggtggttacaaaagatggaaaaggttcagcctctgacctttagtttacaacctagttgacaacaagaagtaaccaagcgagaatgtaaaacaatgaaataatgtagcacacaataaaattaatcctttacttcttaggtgtaatctaacagcccagaaatggtgctagatggtgtggtttctaattccccagggaatttagaccaggaaaagagcatggctggttaagccctaatggggcaggtcaggtttgaataagaggaaaggacaggaaataattacttgggtggaaactttctggagcaggaacacatggaggagaagatggaagacaccaggagccttcctggtcaagagattgagtcagagatgggagaataataataaagatgacataatgacaactaacaaatagtaaatatttactatgtacttgtcaccattctaagtgctttacagggacactcatttaaaatcccccaaaaaactcttattatcgtcttcattttatagaaatagaggcatagagaataacttaccaaaattgtaccaccagtaagtggaagagctagatttggacccaggcagcctgaccgtgccatttatgcttggccatggcactataatgtgaacaaggcattaaggactttggttacactcctgttatcaggctttcccctccgccacaaacttcttgggtcggttaaagtttacttgatattcctcaagtactcactgacctcctgctttgagttgagcagggttccacctaactatgggtagttctttccctccaaactgtgctcaggcctcttaatcagtggacttggtaagactgtcaactgtggcaaggttcatggtcaggagttttcaaggcagagctgaaagccaagtcagacccacctggagaggtttttaaaatgactgactcctccaaccaccattaccctaaacacacacacacgcacacacacacacatgcacacacacagaggtacacacattatctatatatcaactgaaatgtctggtcttacaaacatcttagtgctgacatgccactataggtttagagccactgccatcaaatactctacttttcagttcctgactctgaaggttctatgtaggttccatctaagatggaacttaatacttcagaaacaaaacccctcatttaaaagagctttctctgtttgatattgataccgatactttttaaatgcctttgaatatatcactgacttccatctccaattatttttggcttggttcctggttcatgtgttctgtctcagaaataccaaaaggcattgagctcagttttacactggttgttctcactagagttttcaagtcaggacttggagatcagccaaagtcacggtcccaaagtagaccacaaattgaaggtcatcttttcttaatttcccaagctgggatagtaggagtttaaaatagccactaagacttattaggttctttgaacaacttgtggccagtgggacttgaagttgaaagaaagatctaacatcatagactttcccttgagaagacacagctcaggtatggtttaaaagtatgtgagaatcatatgatagctctactttgaatttgggggggaaatctctatgccattttccataatgactgtactaatttacattctcacaaacagtatacaagaggttttctccatgcccttgtcaatacttgttatcttttgtcttttgatagtagccattctaacaaatgtgaggtgatatctcattttggttttaatttgcatttccctgatgattagtggtgacaaacatttttttcatatacctgttggccatttgtatcttcttttgagaaaagtctgttcagattctcttcccatttttaatcaggttatttcttttcttgctgttgagtttcttatacattttggatattaactgtgcctaagatataaagtttgcaaatattttttcccattctgtatgttttctcttcactctttcaactgtttcctttgctgtgcagaagctttttagttggatacagtcccacttatctagttttgctgttgtttagctttgtgtttttggggtcatatccaaagaaatcattgcccagaccaatgtcaagaagtatttcctttatgttttcttctagtagtttttttttttttttaatagagatgaggtcacactatggtgcccaggatggtcttgaactccctgggatcaagtgatcttcccacctcagcctcccaaagtgctgtaattacaggtgtgagccaccatgccaggcctcttttggcagttttataatttcaggtctatgtttaagtcttcaatccattttaagttgatttttttatatggtgtaagattcagtttcattcttcttcatgtggatatactgttttcccaataccatgtattgaaaagactggggttgtaatccaccactaatcccttgtaaaatccctgcctctctaaaggtatcttcgctcattattcaaacatctcatttgcatgagaactgggatccttttagcttcctgagtcagtacatttggggatgattctctctttatttacagattatagaagcctatacaagtatacaagtgcacaattacatccacacatgcatgcacatacatgcacaagcacatgtgcaacccacattttctctagacacataatcccctaaaacaaattagaaatcaaacatacaactttctaggcttaggggcctcatgggctttatgaagtatcgtttcctcattgctctaaagcactgagggatcaaagtttgatccctggaccagcagcatcagcatcatctggaaatttgttagaaatgctcattcttgggccccacctcatacctcagtcagaaactctggaggtggaaccgagaaacctgggttttaatgagctctctagaagaatctgctgccaacccaatcttgagagctgctggtctaaagaaagcattgcaatatcattttctgaggaatagatagtaaatcctcaaaatgagcctcaattataatggacaattcagaataaatccccttgtatccatcctcccctttgcaccctagacttccactctgctttccccttctaccaaagagtaaatgtacttttgtctctttttaggtctagacaaactgaaaggcaataaatcctatgtgaacatggacctctctccggtggtagagtgcatggaccacgctctaacaagtctcttccctaagactcattatgccgctggaaaagatgccaaaattttctggatacctctgtctcacatgccagcagctttgcaagactttttattgttgaaacagaaagcagagctggctaatcccaaggcagtgtgactcagctaaccacaaatgtctcctccaggctatgaaattggccgatttcaagaacacatctccttttcaaccccattccttatctgctccaacctggactcatttagatcgtgcttatttggattgcaaaagggagtcccaccatcgctggtggtatcccagggtccctgctcaagttttctttgaaaaggagggctggaatggtacatcacataggcaagtcctgccctgtatttaggctttgcctgcttggtgtgatgtaagggaaattgaaagacttgcccattcaaaatgatctttaccgtggcctgccccatgcttatggtccccagcatttacagtaacttgtgaatgttaagtatcatctcttatctaaatattaaaagataagtcaaacatt

SEQ ID NO: 687 - DNA, 46389 bp, Homo sapiens
cttgcagcaatggcttggattagatccacttgcattctcttttttaccttgctttttgcccacatagcagctgtaccggtaagtcgagtcctgctttttggatatttagaaatattaattctagtatacattatccattttctgtatatttatttttttcagattaagtatcttcctgaagaaaatggtaagaattagttcaaatgcacagagagtgtttttgaacttttttccttcggcaagactaataataattttttttctcacttttaacagtacatgatgcagattttggtgaacagaaggatatttcagaaatcaatttaggtgagttcaatttttgtgttattaaagtcttgaaattacttgaaacccagtggtgggattactgaacactttccttcctaatactgtattgtgattctctgggggagaaatattttttggtgctttgtgagaaattgcattttctgaaagataaaaatgcggaaagagaagatagttagaccagactttctaggagagctaggaagtcctcaatggatctagaaatatgtaacaagtttctctttataaaaattttatttttccaatttgtatttggaggaaaaggaaagcaaatagataattattccgattgttaaagaaaaatataagaataagcctctggttatatttagtggggaaacaaaacccaacccctccactggcccatcatattcactaacaactcctcggttgagacttaggggtgagtgtaaagcaatctccacttagacatctcatttacaaatatatttcttgaagaaattcatcagtctcatccattactgagaggagagagaagctgagtcatcatctctgttttctctctgttgtcctgcttctgaaatgagagagaagcctctgcattcccagtgtcttaggtcaggatttgtggaagcagagctattcatgataataagtaccttcagtttacaaaagcttttatatgcaattgcatatttatttgtccagtcttgtcgtggagtaagtgctgttttcatttttttgggaagcgacaggtggcttctcatgggtagagtgacttgctcaagatcataggtagcagtgatggggcttacttccagatcttgtagcccataccttaatagctcagtgctatctgaaggctacaaaactaacataccaataactaagggtcaatttttctggctttgtctcactcacagagaagccagttagttgatatttaattggaatagctggagaatggctgcataggcagagcagaaatagtttaggaaggtaaatgggtgaatgcataaatgggtcccaagacttcagagccaggcactaaaatatctctctttagagttagccattgtgtaaacagttcagagaatctgctgtattttacaacagaaatgggattagaattagagtttttctaatctcatcattatttatctaataaaaattaattatttacctctttgccattttgtactctttaggcccaccaccacctctgatccttgaccccagtggagaaatctcattaccatgtaaatcttctttttaggccatttcaaccaaaccaccaggattgattgggttagccatatggccagattctaacaccataaattgggaaaatcatatagagaaaattgccacctttttaccatcttctttttgcctcacaaggctgagtaaacgtttcttatcctccatcccaagacctgctcctctcagtccttttcatttcagtaaatgtgactcactccttctagattttcggctcagaatgttagagttgcccctaactcttgcttttctctcacacctgacacacaatctgtcagcaaatgttattcgatctactcgatctacttttcttttttctcttttcttttcttttctcctgagatggagtgttgctatgtcacccaggctcgagtgcagtggtgccatctcggctcactgcaacctccgcctcctgggttcaagcgagtctcctgcctcagcctcccgagtagctgggattataggtgcccaccaccatgccaggctagtttttctatttttagtagagatggggtttctctatgttggctaggctggtcttgaactcaagaccttgtgatccgcccaccttagcctcccaaagtgctgagattacaggcatgagccaccacgcctggcctagatctactttcaaatcatactacagttgagacttttcagcacttttactgcccctaccttggtcagccacctcatgtctgggctggtcctttgacaggcctcataactgtgcttccctttctgcctttgctccctaaagactattctgcacaacatagagctctccttttaatatccttcagatcatgtcatttctctgctccaaccatctaatgacttctccttcaacataaagtaaaggccctagagccttgattcccaaagtgtggtccacaggccaaagtgatctgtgtcactcaagagctttctcttagaaatgcagcatttgaggatccaccccagacctacagaattagcatcttcattttgacagacccaagtggtttctatgcacatcagagtgtgagtcaatctgcccctgactactcttccccttcctacttgagctttccagccaccctgactgcacagctactcctctaaggaagtgattttcgatgtgttgtccccaagccagcagcatcggcatcaccaggaaacttgttaggaatgaacattctcaggcctcaccccagacttaatggaccagaaatccaacggtgggggctcatcaacgggtgttgaccaagccttccaagggactctgatgctcaagtttaggaccactgccctaagacatcaaggctttcctgtcacaggacctttctatctggtgttgcctctacctcccctactcttccttcattccctcactctatcatatttctgctaaaatgccacctcctgtgggaggccctgcctgaccactctttaataaaatagcaaacctatctcacctcagcactctttcccactttacctttcatttgtttcttttttattgtacttttcaccatttgtcacactttacagttatttgtttatttgtatgtctccttcttcccccaatcaagagagtcatctccttaaggacttgttttattctctactgtatcccagcatctagaaaaatgcttaagacacattaggcatttaataagtgtatactacatgaacaaattgggtaatgaatagattgaggcttgctctcactggatgtacacttctttgggaggttctccctgccccccatgactccatccattctgactgaccactggggccaaagtctgagtgggcttgttcacttcactctgaaagagctccctcaatcccattataatccaggccaggtgtcaggaaatacagatttttgctcaggacaaacctcaatgtaagaatagatggaccagaacaaagtccctctgtttaaaagatgattcaaatctgggtcctactgacagtgggacagtgatgtcattactgtttgtggttaatcgtactgctaccataagaataggtcagggttaaagaggttaagcaatctaggaaatgtgtgcatgaggaagggaatgatacagggatagccctagttagtcactggcaagtgaaatcatgatgcctgctaatacctaacacctccttggtgtcctatgcataaacggagctggttcctgaatgagccacaggctttgccaaatgaggtctctgttggctcgtgagactgtggtaattaatctctgccttggcttcccagcctgtaaatcagggctgtcctcagaatgaagtacaatccagtgattctgtctgaagttgttgcattttacagaaaatgtttcatgtcacatgagagttatgataagtgatgctcttttaatgcttgagaaattttcctacaaagatcttcccttttaagagtcttgcttactgaaacaggatgaggcaaggattaagcaataacagcagtaggagagtatattctgctaagcacctgagaacagatgtttggagatacggtttagaatggatctatccatattcccctggtcttcctcatgatgtgggcagcaccttgagcttggttttggagggtatcatcgttttttcatgggaaagagcaaaacacactcatttactttgggacaagaggcagaatggtacactggtagaaagagccctggatggaaaggcaggagttttgatgctcacttggccacttgattacatagtacatcacttcatgtctctggactctatttctttctccatttctctcaatagtctttctttctttttctttctttctttctttctctttctttctttctttctttctttctttctttctttctttctttctctctctctttctttctttcttactttctacctttccttccttccttccttccttccttccttccttccttccttccttccttccttccttctttccttccttccttccttccttccttccttttttcttcctctttctttttttgtgagacagagtctggctctgtcacccaggctggagtgcagtggcatgatcttggctcactgtaacctctgcgtcctgggttcaagcaattctcctgcctcagcctcccgagtacctgggactacaggtgcacgccaccatgcccagctaatttttgtacttttagtagagacagggttttaccatgttggccaggctggtcttgaactcctgaccccaggtgattcatccaccttggcctcccaaagtgctgggattacaggcatgagccacaacgcccagccattttctaaatagttttcatcctccttatcagtgctgcatcgaatcccttttttataatcagtgatcagtaaaatcccttctaacttatgtcttacttctaagattcttagacaagatttcttgtcccaaaattgaaaacagaggctatgacaatatgtgatactcatcggccattcacatttgcttaactggaatttttgcattgtttcaaaaagttttgccacataaagattaatattcaaagatttataatggcaaatactaattttattacgaaagatgccttttaataatgttcactcaaatattctttttttaaaaaaaattccacttccagctgcaggcttggacctctttcaaggggacatcctcttgcaggtgagtacctgtcaatgatgcaataagtttctcaggacaggcagtaccactgggtgtgagtctctgctctgcggccagccctgggatgggcactgtgaaggagatgagagaaatctcatctataatctgttccagtgaggagttccactgtagttcctaaggacaaaaacagagggaaaataagtaaacagcacaaaagggtctaaaatgattaaatggcttatctatccagttttcttgggattgcaggccccctttattttgttcttaataatttctctgatttttccaaattatctctcaaggacttctattgctttcataatcaaaagacaaattgccactaaactgtttgagttgtgtgatagactgtttgctctgtgagagtttagtgaaggaggaggtcaaggtgaccttgaggactaggcttcccactcacctttacctttgttttcacagaaatccagaaatggcctgagagacccaaacaccaggtggacgttccccattccttacatcttggctgataatttgggtaatattaattgttcttaattaggaagtttcagtttaactctctctctcctctcagcctgtccatgggcttcacattgggagtaaccaccacgatctaagagagttttcaagtcctgatgcatctttatctaatggggagaaagacataacattacatcaaaagcattgctgcttaaccagtctgagatacacagaatccaagaataacttttaaaatgcaacacacattaaagtattagtataaccaggagaacataaaagagcaaaacctaatgaaatataatttgcatcagaacaaggaaaagtttgcactttgtttaggtgaatctaaatgtagtgtgaggatactattttcagcatattgatttcttctctttttcttacaagagaaacatgccacactttgagaaataggaaagtccatatttcacatgttcacaatccttttttcttggtgttattaatgtctactcttttctctctcttaagaaaaagatctgaatatgttacattttactcattgttagaaataatgactagtagaatgacttccctgccttttagctaaggttgcatatagaactagcaactggtagaaataagtaaatattagaagccacatgtaggcactggctgaccctcaagcagttgactgacagctgagcagccatgatgactcaatgtctgcaaggcccctcctgcttagacagatgaacaagattagagtgaagaagggaagccaggacagggttgcttagtcttgttgggctgctaggctgctcctactctcaggagatgtagattatgtttcagtattttccatcctctttatcagtgctgcctcgaatccctgtttatggagaacagctagatataaacaaatgttattgttcacagctattagttggaaaattgagttgttttctccagtgtttgccttgcaaattcacggaacatcaatacttaatggaacatgatttaagaaacaccaactttaaaaggggttctttcccattacaatttgttttatcctggttgtcacatctgcaccaccctattatgtgccaggctctgtgccttcatctgatattttatgtaacctttaccatgcctctgtaaggtgtaaggtagtgcttctcagactttaatgtgcataggactcagatgaggatcctgttaacctacagagtaggtcagcgttggtgtgtgagatgttgcatgtccaacggtcctctagtgatgctgatgctattggtccccacgcagaccacagcttaagtagtaaggtctctctagttgcaagataggtaagaaattatatttgagagtgatttgagacaagtgaactgacataagataaaggtattaaggatacagcagtatttctcaagcaataccacgtgaaggtcacctttagtgttaaagttcagatgcccagacccagaccactgtgaaagcaaactttctaactagagttgaatatttgtatagaattgttttattcaagttaaatttacatagagtgaaatacacaaatcagtatataaggcttttgacaaacacatatacctatataatgcacacttccatcattccataaagttcctttctaggcagttcccatccccactccttaagagacaaccaccattctgattttcccctatgtattagttttgcctgatttacaactgatttacagataaatgaactcatataccatagtatttgttttataaatactatgtgtctggcttctttgacttatgttttttaagttcttccatattgttgtagatcaacagtaaattctttttttaaactactcagtaatatttctttgtaatactatactgtaaattactgtccatttttctgttggggctagtatgaagaaaactgttatgataattcttatacaagtttatgtgaatacattttttatttatctttggtaaatgcctaggaatataattgcttggtcatatggataactatgtaagaaaacgccaaacagttttccaaagtggctgtgccattgtacactcctcctgaaaatatatgagtgtttcatttgctccacatcctcgctaatattgatagcattaatctttgtagttatagccattttagtagttgtaaaatggtatctccctacgattttaatttgcatttccctaatgattagtgatatttagcacattttagtatgctactggctatttttgtatcttcttttacgagggtctgtccaactccttcatgagttttaaaaattatattgtttgtctttttattatttgtaggattttatatattatggctaaagccctttttcagatatatgtattataaatattttctgttagtctgttacttacctatttgtttttgtttttcaagcagtgaattttgaaatgcaaaagctttaaatgctgataaagtgtgatttatcaattttttaacttatggtttgtgtttttatattctaagaaatatgtgcttaaaccaagtcacaaagatatattccaatattttttgaagttgtatggtttcaatttttgtctataattgattgcaaactaattttgtgtacaacaggatgaagagattgagactgattggttggtatttattagcccagttgttccagcaacatttgctataaaattttgctttcctcattaagtactcttcgcaagagtctcgtttgccaagtttgccaagactcctcatttcttgatctggtatctctgttttcctatcttattctacttgtttatcatcatgtcaaaaatcactatgttgattactctagcttcacagttaaccttgaattgagtgttccagctttgctctccaatttcaagactgtttagcctactccagaccttttgcattttcatgtatattttacaatcaatttctctaaaaagcctgctgggattttgataggaatgtgttgattctgtacataaatttgtagaaaactaatttcttaaaaatattgagtcctataatccataaacatggtacatcagtccatttatttcagtcttctttaatttatctaatccgtgttttataaatttcagtgtagagaccttgtgtgtctttggtaaattcatttctaagcattttatatttttgatgctattaaaatgaaatttaaaaaattttactacataatgttttctgctaatatataaaaatacaatggatttttatatattgattttgtattctgttaccttgctaaatttactcattaattttaattgttgatttgtagatttttttaggacttttagtaaaaattcttcttgccttttaatatagacagtgttactggttcctttccaatttttacaccatatattgctttttcttgtcttattgttctggctaggaccttcattaccatgttgaatagaagtggtaagagtggacatctttgcctcattggcttgtttagtggtagtattcaatacttcattcatgtgggacactgtaggttttccacagatgccctttgtcagatggtatgttttcatcatgaatagttgttacagtgtatcaaatgcttttcctgcaacaattaagtataatttttattccttattgtgtaatatggtaataacatcaaatttgaatgctaaatcaactttgcatttctcagatgagccctacttggttatgatgtattatccttttcatattttgctggattcctaatattttgttatacatttttgtgtttatattcataaatagtataagtttctaatttacctttttgtaatatctttattaggctttagtaataaagttatgtagctctcaaaaccatcttgaaaatttttcctcttcttttatcttttgaataagtttgtgtatgatcaaaattttttctttcttaaatgttggtaaaaatcaccaataaaataaataataaatttgtttgttggtaaaattcaccgataaaataaaataaccaagtaatggaattttctttgtgggatagtatttttataatgaattcgattcatttaataattatagaattattcttattttctattatgctgcttttattaaattgtatttttcagtaataaaaaattaagattatcttaatagatgcagaaaaagcatttgacaaaattcaacaactatttcaactaagttgtcaaaatagtggcataatatctcattatctttataatgtctgtagaatctttagtgatagtcctatttcacttttgatattggcaatttgtgttttccctctttttttcttgacatgtcctgccagggacttattgattttattaatatttttacagaattgacttttgatttgttaattttctcttgcttctctgctttatatttagttgctttctgttacctttattatttcctttctcctacttatttcaggtttagtttactcttcttttttgacattcttaagatgaaaattcatatcacttattttaaaccttcattttttctaatgtaatatattctacaacatggctactaaagctataaattttatctgaagcactgctttactgccttcttcaaattttgatatggtgtatgcttattaaaatttagtttattaatagatacttcataatttatcttgtgaatattttcatccatggatgggataaaagtatgtttacatttttaaaaatattgtccttagcgttaatattatgcaagcattttacaatagtataattccatttatacccctgccctttgtactttattggtttatattttccatctacatgcttcataagtctcgcactatagtgttagaattttttatttaaacagttatcttttaaagtaattgatgaaaaacaagagtcttcgtatttacttttacacttgaaatttctggtgctcctcattcctcctgtaaatctgagttcttctctagtatcatttctcttcagtctgaagaacttcctttagcacttcttataaagcagatttgttgatgacaaattctggtttttcttttacctgaaaatgatctttattttgcctaaattttgaggatattttaactggaaatagaatttcggtttatagtagtgttaaaaattattattttaacatttttaagttgtaatacattgtctttttgttttccaacatttgattataaaaacttttaaataatcaaaaagttaaaagcattatgcagcgaacattcacatactcataacctaaattacaattaacagttttatttgctttatttcgtctatccatcccaatatccctctatgaatctatcaatccattgtatttttgatgcatttcaaagtcgctttcgggcactagtacactttaccccagtcacctaagtatgcatgtaattaactacaggtcaatatttgtatatagttcccttttacataaaatatatatagggtaaaatgcatgagtctcagatgtacaattcaatgagttcttaaagatctatgcacctatgtaatccaaattcctatcaagagatggaacatgtttataatgtatgtacctctgaaacctaacttcctatgaagagatggaacactgttatccttccagagagttctgttatggcccttccaagttattctcacttttccagaaaaagaaggtgctattctattttttcttttttcttcataggtgaatttaacctcttctagaatttcatataaatggaatcatatgttatatactcttttgagtaaggctttgttttactcagtaaaatgttcttgggatgcatcaatgttgctgcgtttataagcaatttgttctttttttgttactgtcatttcattgaatttagtatatcacagcttgtttaatcattctcttcgattgatgctatgttttggctgttatgaataaagctactatgagtagccttgcacatattcttttatgaaatatattctcatatctctggtgtaaataagaataaaattgctgggttatagtataggtgtaggtttagtgttagacctctttcaatgtgctggtaccattttatacaaccacaaacaatgtacgtgagtttcgtttactccatgcctttgctaacatttggtgttgtcaatttttaaagttttagccattctgttgggcatctagtgctattttattaatttattgatttatatttccattatgactagtaatgttgacctcctttaaagttactcattggtcatttgtatatcttcccttataaaatatctgctctgttaacccattttaaaaattgagttgttatttagtattgagttctaagtgttctttatatattttggatatgtcttttatcagatatatattttgcaaatattttgctccagatacactgtttcttgtctccagtgtctgataataaatcatccatctttcaaactttcatattattgttctcctgtatgtaatgtcttttttctctagttgttttcaatacgttctttttatttttgtttttataacagcttgattatggtatgcttatgctgattttctttttatctatcctgtttgggctcaccaagtttcttctgtctttaaggtgatttttaaataaccaaatctgaaaaacgttaggccattatttgctcaaatatttttctgtgtttctcctgtccatcagagactctaactgcacatatcttagactgggtgatttttttcccattggtcactaaagcgctattcatttttctgaacatttttctctctgtctcttttaccatcgccagtcagcttttaaaattatccagtgaattttttatttttgatataatactgatagaattttcattgggttcttttatataattcccatttgtctgctgagattatttgtatgttcatctttattccattaaattatgtaacaagtatacaatagagatttaaagtgtttgtctgttaagtctaacattttagtcaccttggggtctgtttctctttctagttattgcttttactaatatctatcaataacaatttcctgttccttcacaggtctcataatttttgattatatattagacattgtgttacattgtagtgattatgcgtgttttcattctcctctgaattgtgttaatttttgttagagcagttaaattactgcatgatcatctggaatttgtggaggattttgtggtcttgcccttagttcaaggcaaatctcttagttctggaatatagtctttactgttaagtcatggtccttctgggatttcaatggaatgcccgagtttccccaacccctgtaaatttgcatgactcaaactccaaattcttcctccactgcagtgggcagcaactgatgtatctgttcaggttgctcagccttccaatggctactacctactgaggggcttggagccttctcccatttatgcaaagttcatgagtcagacaaggattgaaggggcacttatatacagactttgggatgaatctcctcttcatctaccatgactttcctttctaggactttctcccttgattttcagccactcgggttaaaactcagccccaaacttgtccttgtggtatgttaagaaaatgcaactgtagatttatacttgagttctctttcttgcattgaagaaattagagcgtgccctcatgcaaaaagctgtataaatgtgaatcttacccaatgaaattttccttcttttaagaaaaagtcctccagtttctgcctgttttagccattttccagcatatttaaagagtttattttcttattttttcaagtttacaactgttatctgtgggaggattaattagattcaagctccttgacaattttgagcaccagaaattctctcaaaggaattcctaaactgaatctaggtagccttcttatgcttatcttctaatacgtacagccattggtatctaaaattaactcttctcaaaagaaaaaaaaagaacaaataaagttaactcttcttatattatttgatccaaggttaaaggaatgctagtggttttcaaaactaacttgtttgacacagaactatgtacaacttactatgtcagggcagttggctaggaacaagagttacaatgagacaaaaagtatatccctttctctcaaggagctaacagtatcttaagtgtagcaaaccacctacataaagacaactcaagccttggccacctataatctcagcactttgggaagccgaggcaggaagatcacttgagcctaggagttcaagtcgagcctgagcaacaaagtgagacccccatctgaaataaagaaagaaagaaagaaagaaagaaagaaagaaagaaagaaagaaagaaagaaaggaaggaaggaaggaaggaaggaaggaaggaaggaaggaaggaaggaaggaaggaaagaaggaaggaaagggagaaaggagaggaggaggaagagaagaaggaggaggaggagaaggaggaggaggaggagaaggaaaaaacaagaagaagaagaggaaaacagaagaaggagggaaggaaaggaaggaaggaagggagaaaggaaagaaagaaagaaagaaagaaagaaagaaagaaagaaagaaagaaagaaagaaagaaagaaagaaaggaagaaaggaaataaatcagtcaaatgtggctcctgcattcagaggaggagcactcagggttgccttcatggagaagagaaagacttcaaatgggctctgtttccatttatcccaataatgttgaggtagtttttacaaaattattacagagttgcttagttccctctttacagcttatttaggtatggagaaggaagaaaaggtataattttaaaattaatcactctcagaaatcccaccatttggattgagaataacaaaagcgaaatagccttctaggaagcttgctttcagtataatcactttttttttctcacatttttgtgacaccacagctaccttgggtacatctcttcatattacagatgtaactaagtaagaataggtaaaagtacatgaaaatctcccagcagatgtaatgaatgctcttgttattgttatctgtgtagtttccacaattagtttattgactattcccatgactatttctttaatgatcttgatatgacattatatgacatttaggctgtggagtctccaacttgatagtttattaaatgaaataaaggccagaaaatgtgatgtaatttcctggccaatagatataaactctttgagagaaagcactaaatcaaatgtgcaagaaatgtaattttattttatataacttggcttaatttttaacttagattctaaccttcaatgagttgatgggagggtaaaatgcacacaaagtaaaacataatctcagtttctctggagtatctttcttttctaccccatctttgtcttacaatgccaaagtgcatgcatgctaggtgaaaggaaaggcatttgatctttggtcattggtccccacaggttactagtcagtatctatttttcctgccccttcaagtccattaggcttctgctgcttgggtgctgagctcgggatacagaaatctcttctaaggctctgtgcagtactagctgtctagtcttgccatctcccaggcatctggctgggaagcagggtaaaataccgtatgtgcttcttatgctttcagaacccacaaacctctctaagttctgctttcctcctccagaaagagagaatgtctttttagattggggtaaggaacactattctcactgcctcactctaaggtactttatctatgtcaactaaagccagagctactcacaagccacttctgttttctgttctgccatgtgactctcctgaggcaatgcactctaaatctctgcttcagtgggggaaaggcaaagggagaaagtgtggaagttattttattattttatttagccatatacacatgtgtatattcttattttgtagacatatttgcattgtgcatttaaggtatgcacttaatgtttatgcccacaactaattttgcagatgtccacaaccaattttgcagttttagttaccaggaaatctatttattaccaaaaaccctatcatgcacctctgtggatttaatgtggcagcatggttttctctaaactataagttatagatattatctaaggtccaaataatgctcattgatatttttactgatttctgcagggctgaatgctaaaggagccattctgtatgcctttgagatgttccgtctcaagtcctgtgtggatttcaagccctatgaaggagagagctcatatatcatatttcaacagtttgatgggttggtatgaaattttacggagtgaaaatcatgcatactttggttcgtaagaagtattctttccccgagtccccaaagtccaatgtatcattcttttgtctttgcgtcctcataacttagctcccacatatgagtgagaacatacaatgtttgttttttccattcctgagttacttcacttagaataatggtctccaactccatccaggttgctgtgaatgccattattttgttcctttttatggctgagtagtaatacatggtgtgtgtgtgtgtatatatatatatattttacatatatttttttttctttatcaccttgttgattgatgggcatttgggctggttccatattttttcagttgcaaattgtgctgctataaacatccatgtgcaagtatctttttcgtataatgacttcttttcctgtgggtagatacctagtagtgggattgctggatcaaatggtagttctacttttagttctttaaggaacctccacactgttttccatagtcactgtactagtttacattcccacccacagtgtaaaagtgttcccttttcactgcatccacaccaatatatataatttttaaaaattttttaattatggccatttctgcaagagtaaggtcgtatcacattatagttttgatttgtgtttccctgataattagtaatgttgaacatgttttcatatgcctgttggccatttctgtatcttcttttgagaattgtctattcacattcttagcccaatttttgatgggattgtttgtttttttcttgctaatttgtttgggttatttgtagattccagatattcgtcctttgttggatgtatacattgtgaaaattttctcccactctgtgggttgtctgttaactctgctgattatttcttttgccatgcagaagcttttgagtttaattaagtcccactgatttatctttgtttttgttgcatttgcttttagcttcttgtcatgaagtctttgcctacgccaatgtctagaagggtttttctgattttaccttctagaatctttatgggttcaggtcttagatttaagtctttgatccatcttgagttgatttctgtatagggtgagagaagaggctctagtttcattcttctacatgtggcttgccaattatcccagcaccgtttattgaataggatgtcatttccccactttatgtttttgtttgttttgttgaagatcagttggctgtaagtatttgagtttatttctgggttctctattctgttccattggtctatgtatctatttttataccagtactttcctgtttttggtgactatggccttacagtatagtttgaagttgggtaacgtgatgactccagatttgttctttttacttagtcttgtgttggctatgtgggttcttttttggttccatgtgaattttaggatggtttttccaggtctgtgaagaatgatggtggtattttgatgggaattgtatagaatttgtagattgcttttggcaattgtgttcactttcacagtatggattctactcatccatgagcaagggatagctttccatttgtttgtgtcatctatgatttctttcagcagtgttttgtagttttccttgcagtggtctttcagtctttggttaggtatattcctaagtattttattttatattttgcagctattgtgaaatgggttgagttcttgatttgattcttagcttggacactgttggtgtttagcagagctactgatttgtgtaaattaattttgtatcctgaaattttgttgattttatttaccagttctaggagctttttggatgagtctttagggtttttttaggtatacaatcatatcatcagcaaacagtgataatttgacttcctgtttactgatttggatgccctttatttctctctcttgtctgattgctttggctaggacttccagtagtatgttgaatagaagtagtaacagagggcatctttgtcttgtaccagttctcaggggaaatgctttcaactttttatcattcactataaagttgactgtggatttgttgtagatggcttttattaccttaaggtatgtcctttctgtgccaattttgctgaggtttttaatcatacagggatggtggactttgccaaatgctttttctccatctattaagatgattatgtgaattttgtttttaattctctttatgtggtgtatcacatttattgattttgtatgtgaaaccatccctgcatccctggtatgaaacccacttgatcatgttgaattatctttttgatatgctgttggattcagttcatcagtacattattgaggatttttgcctgtgtgttcatcagggatattggtctgtagttttctttgtttgttatgtccttccctggtttgggtattaaggagatactggcttcatagaatgatttagggaggattccctctttctctatcttttggaatagtgtcactaggattggtaccaattcttctttgaatgtcttgtataattcatctctgaatccatctggtcctggacttttttttgttggcaatttttgaattgccatttcaatctcactacttgttatttgtctgttaagagattctatatattcctggtttaatctaggagggttgtatatttccaggaatttatccatctcttctaggttttctaatttatgcacataaaggtgttcaaagtagccttgaataatctttcatatttctgtggtatcagttgtaatagctcccattttgtttctaattgagcttattgggatcttctgtcttcttttcttggttaatctcactaataatctatcaattttatttattttttcaaagaaccagatttttgtttcatttgtcttttgtatttttttattccgtttcatttagttgtgctctgatatttgttgtttcttttcttatgctgggtttggatttggattgttcttgtttctccaattctgtgtggtgtaaccttagattgtctatttgtgctctttcagactttttggtgtcatttaattctatgaactttcctcttagcactgcttttgctatatcccagaggttttgataggttgtgtcactattatcattcagtccaaaatttttttttaatttccatcttgatttcattgttgacccagtgatcattcaggggcaggttatttaatttccatgcatttgcatggttttgagggttctttttggagtgatttccaattctgtttgactgtggtctgagagtgtacttgatataattttgattttcttatatttactgagacttgttttgtggtctatcatatggcctaacttggagaatgttccatgtgctggtaactataatgtatattctgcaattgttgggtagaatgttctgtaaatatctgttaagtccatttgttttagggtatagttaaagtccattgtttctttgttgactttctgtcttgatgacctgtctagtgccgtcagtgagtattaaagtcccccactgttattgtgttgccatccacctcatttcttaggtctagtagtaacagttttataaattgagggtctccagaattaggtaaatatatttttagaatatctttccactcctttaccttaagtttatgtgagtccttatgtgttatgtgaggcctcaaaaccatgcaaatacgtggaaattaaataacctgctgctgagtaatcattgggtcaaccatgaaatcaagacggaaatataaaaattatttgaactgaatgataatagtgacacaacctatcaaaacctctgggatacagcaaaaagcaaaagtggtgctaagaggaaagttccacagcattaaatgcctacatcaaaagtctgaaagagtacaaatagacaattctgaagacagcagaaacttggttggtgaattcttattcattctgctattctgtatctttttaagtggagaatttagggcatttacattcactgttattattggggtgtgaggtactattctatacattgtgcaatttgttgcttgaatatcttggttttttttcactgtgttattgttatataggttctgtaagatttatgctttaaggagttctattttggtatattttgaggatttgtttcaagatttagagctccttttagcagttcttgtagtactggcttggtagtggcaaattctctcagcatttatttgtttgaaaaagactgtatctttccttcgtttattaagcttagtttcaccagatactaaattcttgactaataattgttttgtttaaggaggttaaaaataggaccccaatgccttctagcttgtagggtttctgctgagaaatctgctgttaatctgataggttttcctttatgagttacctgatgcttttgcttcacagctcttaagattctttcctttgtcttgatttgagataacctgatgactgtgtgcctaggcgatgatctttttgagatgcatttcccaggtgttctttgagattcttatatttggatgtctagatctctagcaaggctggggaagttttcctcaattattccctcaaatacgttttccaaatatttggatttctccttcttctggtacaccaattattcttaggtttggatgtttaacatagtccaaacttcttcgaagctttgttcatttaaaaaatttttttgtttgtttttgatggatggggttaattcaaaagccttgcctttgagcactaagattctttcttctgcttgttcgattctattgctgagactttccagtgcattttgcatttctctaagtatgtccttgatttccagaagttgtgattgttttttatttatgctatctatttcactgaagatttttcctttcatattctcatcatgtttttgatttctttaagttggactttacctttctctggtgcctccttgattggcttaataactgaccttcaaaattctttttctggcaattcagagattttgtcttcatttggctccattgcggtgcactgacatgatcttttggcagtgttaaagaatcttgttttgacatatcaccagaattgtttttctggtcccttctcatttgggtagactgtgtcagagggaagatctggaattcaagggctgtttttcagatttttttgtcccacagggtgctcccttgatgtggtgttctcccccttcccctaggaatggggcttcttgagagctgaactgtagtgattgtttttgctcttctggatctagccacccagcagagctactgggctctgggctggtactgaggagtacaaagagtctggtgatgtgatttgtcttcaggtcttgcagctatggacaccagcacctgctccagtggaggtagcatgggaatgaagtggactctgtgaaggtccttggttgtgtttttgtttagtgtgctggttttgtgttggcaatcctccagccaggaggtggcactttcaagagtgcatcagctacggtcctatagggaggatgcaaacctgccctagggacacctggttaagtattcaggtttctcagctggtgggcaaggccatagagctctcaagagattctgacctttgtctttggctaccagggcaggtagagaaagatcaccaggttggagcagggataggcatgtctgagctcagcctctccttgggcagggcttgctgtggctgttgtggggaatgggggtgtggtttccagtccagtggagttatactccaggagggattatggctgcctctgctgagtcatacaggttgccaaggaagtggggaaaagcctgcagccacaggcctcaccctgctcccatgcagcccgcagtcctaaaggctgggcttattcccaccttgccccttcaacagcactgagtccatttccagtcgtctggtgaccaaggttgagaacttgtcccggaccacgagcctccttgttgagaaagcaagcagactcacaggttttcagcatctcaggcaacctgcagttgtgatccagttccttcaaagggtctatggattgtcttggctttcctggtatgttcctgcagtagttctcggagcaaaaattcatgatgtgagtctccctacactgctctgtccaggcagctgcaagctaatcctgcctctcatcccccatcttaatcctgagtcctgaccgtggggttttgataatgatggatggatagtatgatgaaaatggtagttagcacatgatttagcctcttaggaaaaaaaatgcaaaaaatagcagttaaataaaagaaaaatactgacaactacttagatacaaattaaatacctaacttacctgagtagttacttttggagcttattcatttatttatttatttattatttttttgagacagagtctctctctgtcagccaggctggagtacagtggcatgatctcggctcactggaacctccatctcccgggctcaagcaattctcctgcctcagcctcttgagtagctgggatcacaggcgtgtgccaccatgcttggctaatttttgtatttttagtagagatgggggtttcaccatgttggccaggctggtcttgaactcctgacctcaggtaatcggcccacctcaacctccgaaagtgctgggattacaggcgtgagccaccattacaggcatgagccaccgcgcccggcctcattcttctatttttaaaaaaattgcacacctactacattccaggaagtgtgctagactgtaggtgcaacaaaatatgcaatacggtcttagccctcagcaggcttacagttaccaggtgggggtggtggagaaatgagtatattgtcttaatacatgacaatgagtgtcctgggttgcagcagggcaagagtggggccactgagaaagtgtgggatgaagcatcagggagagttgagatgagtgttagagagaagaagggaggacaaatcagaggcaggaagagggagagagggaaagggtgaggaggagaaggaggaagaagaaggggaggaggggatcaaagggaagaagagggagagggagagggtgaggagagagcaaacatgaacctgaacctggttacttggagaaccccctaagttcagtgcctggagcttttcatgtcaggagcttttcatggactcagtgctgttgaaggggcacagtgggaataagcccagcctttaggactgcgggctgcatgggaacaggttgaggcctgtgactgtaggcttttccccacttccttggcaacctgtatgactcagcaggggcagccataatcccataatgagcaagagccaggaaggtgagcaggagcctggtgatggagagccatgtgtgagggaacctattgtttggtgcaaggttcattctatgctcagttttccactgtagaaagatgacttgatcaacagtggataaagaattgaaatagagcaagactggtggcaagagatcaattaacagatgctccagttttctaggggaaaaatggaaggtacctacaccaaggaagaggcaggtgatataaagaagagggaatggatttcagaaatctgtgaaaaagtgtatttatcagaacctaaccttatcaaattggttagtgggaggaggggttaggaaaggagaggagtcaaaagtatctgagatttcagatttggatgactggcaagtggtaacttcatttgctgaggctgggaatattgctgaaagaataactttggggatgaggtaggagagtaaactcatcttactgcatgtgttttattgcttgaggtttttgcaggtcatataaatggagataaccaatagtagttagatagtttatttttctgtaaaggggaaacatttaaagtatatctcaggccttgcaaagaccacacattttagggcctctctgcttttgactactgcattttgtcccttggcaatctctgaccttcaaggaagtgctaaaacccttaatttttcattgaaaacgtcagagaaacaattaactttattaacaaatttatttccattcttcagctaccacttttgcatcattcttttttcacaaagaaactccttaaaaataaaacaaaatccacataattactttccaaaattctcactttcacagtgaagttctcccaacttctttttttgttttcaagtgagtcccaactacttgattaaggggtaggtcagctttgagagacattctttgtaaaagcactgaatctgggaaacctaatcacctatggccaggagatgtctctgttacagataatttaagagagggaaaaagagaggaagatattttgggaagggactggcccaaagtgcccctaagcccttcagggcactggtctcctgaagttggaggctaactgggactctttcagaaagacaaggtcaaaagttctcagtgaggtggaatgtatggtatttttgcaacttatgtctttctgttgggggaggaatttaaaaagaaagatgaataataaatgctttctctgagttgtgaatattttgcagagtaaactctgatttggtaataaaatgccactatcagagaggcaagttgatcatggttacatttgcataacactgtaaatttactaaaagtcattgaattgtatacttaaaattaaagaattttatagtatataaattataccttaataaagttattagaaaataaataactaagattcatctttgagtaaaaatcaaatctgttagcctttgaaggtatactgtgtcagtagtcttggggagaacattggcaggtaagacactgtgactgtcaccatgaaacttgcaatccattggttgcatttatgactatcaggaaatctttcttttctgctcagcattgggtaaaatatagatcttcatttgacaatttaaagccaataggagacaatttgtggaaagctttgggtttgctaatagaggtgaaaaattgggtttatgagaagagaaaaaataattggggggagaatgaaagaggaagacattctaccgtaaggaattcagggaatctgacagaggttcccgagcccactgatttcagagggacgctacaggtcctccttgcctgatacccttcagaaataagttaggcagccttctctgtgctgtcataacactgtagatctgctatttccgaagacatggattttattaatttgctttttaatgaggatctttttatgatcataaaatatatgcttgttcattataggaactttgaaaatttattaaagtataaaagggctaggtgcgatggctcacacctgtaatcctagcattttgggaggtcaaggagggcaaatcgtttgagcccaggagtttgagaccaggctgggcaacatggcaaaaccctgtctctacaaaaaaataaaaacattatctgcctgtggttccaagtcccagcctctcaggaggctgaggtgggaagatcacctgagtagaggaggctgaggctgctgtgagctgtgattgtggcactgcacagcaacctgagtgataaagtgagacccccaatctcaaaaaaattaaatcaaccacagctttccctcagacaacaattttttagataaaggcaacagtgttattctttggagtgccctgtgggtttgtggaggtgagaaggaatgccaatgtttattgctttctaccttgacgaattgttataataggattgatttgcttctgagtatgtgccacttttataatgtattatatcttcacttttaaagcctgcacagtattccctctagggaatgctccttctttaagcagtccccatctttggaccattagcatatgagaatgctgttggtaatttctttctaaaatcaagcctaatttcctcctaatttgtgttttggagtactgtgaatgacagccacttaaaaattctctagaagaaatttttcctcttctcctctttaaaggtgctggtctgaggttggtgaccaacatgtgggacagaacatttccattggccaaggatgtgcctataaggccatcatagaacacgagatcctgcatgctttgggattttaccacgagcagtcaaggacggaccgggatgattatgtgaacatctggtgggaccaaattctttcaggtgtgattgggcggagattgctatcacatttatcactggctgagaccaatcctgagatgaccaagccaaatctgtgtggacaggagcttcagcctctctagtgggaagaaagactctgaagaggttatgatttgttggccctttatgtgggctgtgctggtctgaccggaattcatcgcagataagggcctcaaggaatggtgttaactcactgtgggggtcaactgaaagttaaccagaagctttgctttatatcagtgttttcattaaaactctatctaaaactctactttcctgtcttactgaggaaagtgaatccagattttaaagtcatttctctggatgtgaaatctcctgtgcctctagaaggctgtttgaggtttagttgattattccatgactatagggcatactcaagaagtattttttccagttgctttaccaaatcaataaaaaatgtttaaaaacaaaaacaaaaataaatgcttttatctgaaataacaccccaattatgttaattctagctagttatctgggttctgattaatcaaaggtgaatgtttttttcttccttgtttctaagcaccttgcttcttctgcctccacctcatacaatgcaaaatacaacagttttgtcttacgtattattccgttgtattattttaactatttcattgttctttaggttgttttgttttgttttgagacagagttttgctcttgtggcccaggctggagtgcaatggtgcgatctcagctcactgcaacctctgcctcctgagttcaagcgattctcctgcctcagggaggcagatgggattataggtgtgtgtcaccatgcctggctaattctgtattttttaagtagagatgggatttcatcatgttggttaggctggtcttgaactcctgacctcaggtgatcggcctgccttggcctcccaaagtgctgggattacaggcatgagccaccaccgtgtccggcccttactttccttaattgtttgagacaatgaagtagagtgcttttgagtacactaaaacatttattgagcagcttcctgatgtggtagaaaaaaaaaaagtcaatgctgtgtttctgaagatacctagtttttaagaaggaattagtgaagagaatgcaaaaacattgtttttggcagtaagagattaatgaaactttaatatatttaaaatgccttaactgtttccggcatggcttttataaaacaaataatagccttgtgtaggtatctgttttatttagatcccaattttatatgcggattcatatattgcagtgcatctataataattttacttttgggggcttggaagaactgaccaagctttataattaaatatgaatcctcaaaagttttctgccaggactgtagtagttcattttggagtaagatggtcaatgattttcacatgagatgagggtagagagggctaatcaaaatcacctgtgaggtttctcatcctgtgccttctcagtctcttatattctggtaattctatgaatgtggattggtgtagtaaggaagaaaactgtaacttataatagtctaataggtcaccagctttgagcctaaccacatactccgaccatcttaccaccacccactgaaccagaggccagatagcactcttctttgcctcccagtccaatccagaaaagttttggagcatattcacccagagatgaaataataactcagacttcatgtacctatctctcagtagtaattgtgttataactgtgtgtgtgtgtagaaggaagaaggaaatggagtaataggtcaaaggactgaatctctgattgcactactcaggggactattagactttgtctatatttgcctgtaagcctcaatttcttaccttcctgtacatatactgggctttgatgaaaatgttgtaaggaagcagaaaacatttctatttccaagtcttatagaatacaatacttaatgcttttaaaatggttttaggccaaatgaggttccctttatcggagtgagggacatttgccagggtcaagtgcagacttgctcagctctggtttgagcacgggttgctcaacacatatttgctcatctcctatctgtgttttcatcaggtacaattccgtatatctaaattgcctgcaaccacgggagaactgttctcaaaagagacatcaaatccaataagattatcaacataggcagtattttttatcagggtaatttgtgagttttattgatttaactttggtcaataacaagctttctgtttaacttaagaagacactgtactggcaatgtaattctctcccaatgtccatctccatttcttgaatcagaattgtgtttttgaaatttctttccttatgctagggaaaaaactcaacttttgaggtctagcaggggttgacaaactatagtccatgggccatatctacttgcttttgtaaataaagctttatggaaacacaatcataaccatttgtttaagtattgtatatggctgttttcgtgctacaatggcagagttgagtagttacaacagagaacatattttctatctactctagaacaggtttgctgactgatccctggtttacaggatcgcatgccctggattacagccccttttcaagtctcagctgtgagtccctatcctattcactgttgggggcactaccaacctagcacagctcttagtagacactaggcccaacaaaaacatgttgaatacattttcaaatattattcaaaatatatgtttgttaagtattctcataagaatccatgagtaacacagattaaaataatctattctaacctgatgggatttttgtttttgttttgagacagagccttgctctgtcttccaggctggagtgcaacggtgcaatctcagctcactacaacctccacctcctgggttcaagcgattctcatgcctcagcctcctgaatagctgggatgactggcgtccaccaccatgcccagctaatttttgtattttttagtagagatggggtttcaccatgtggaccaggctggtctcgaactcctggcctcaagtgattcacctgcctcagcctcccaaagtgctgggattacaggtgtgaaccaccgtgcccagcctctaatcagatggttttatggaaaattaagtaaagcacatccagtgagttgaaagtgctttgcttcaggtgccactgagagttaccaagagattgtagactcttatgctctttaaaattccattacctcaaatgacatcctaggaccaagtactctggagggattaactttccccttccctgttagagccattgtttcttttagacttgtcccaccttcaaaaatgctttgatccctctcaagtaatccccaatataatccccatgatttgggagaatgaaacatcagtattcagattttacagttaaagcaagatattgctcaaacatggtcttgctccttagcttttccaaaagcattcagagactccctcaggcacctgctggagcatcgcctggccacaccacacttctgcagtcctgcatatagctctgtatgaggcagttacattttcttctctctaattgttcaaagtaactggatgaggccaggcacggtggctcatgcctataatcccagcactttgagaggccgatgcaggcagatcacctgaggtcaggggtttgagaccagcctggccaatgtggtgaaacctcatctctactaaaaattaaacaattagccaggcgtggtgccacgtgcctgtaatcccagctactcaggaggctgaggcaggagaattgtttgaacccaggaggcagaggttgcagtgagctgagatcttgccattgcacaccagcctgggcaacagagcaaaaactccgtctcaaaactaaacaagtaaacaaacaaaaagtgactggacaaggagctagagaaggagaatacgaggatgggaagttatgactggaagagttagctgcatttgcattcagttttcctatcactccacaagaagaaaatcaaaaaaatctgcaaacctttccattaatgcagcccaaacagtaaattcccgatggttattagtcaattcaaagaccctctgatcagttattttgttcagctttttacattgcagcacatcttatctcactttcactaatctcagaaaaatatttacctttcctcttttgataggaaaataagttttcttcttcctattttatttttgttctccatgaggctatttctgaaacagaaggatgtgagccttgattggcaggatcccctgtcttgctttcagctgcttacctttccctctgcccctcagatttccttctcctaacccatgaagagtaggccaggtacagctctgggcagactcagtgtatgaggtacttggctgttagaacgatgtgtcttgaacataattgattgtgaacattttcctgaattcaaaaattatttttcctgtcatttggaataccttcctcagctttgctattttaccttctctttctgaaagtcttacacacacgtacacacacacccagatacacacgtatttatatatatttataatgtatctttggtgtaaacatgtacatgtatttagtcatttctaatatttatttaaatttacaatatgtattttatagttattacaatattatatatgttattgtatattaatatattaactaatattaataatgattcatagtaattttacattatattgcttataaaatataatttatatttaaataaatctatttaaataaatctatttaaatatatataaattatcatctatttaatatataaattatatattaaatagatgtatttaaatatataaattatatatattaaatagatgtatttaaatatatataaattatatatttaaataaatgtatttaaatttatataatgtatttaaatagatgtatttaaatatatataaattatgtatttaaatagatgtatttaaatatatataaattatgtatttaaatagatgtatttaaatatatataaattatgtatttaaatagatgtatttaaatatatataaatgatgtatttaattagatgtatttaaatatatataaattatatatataaattatatatttaaatagatctatttaaatatatataaattatatatataaattatatatttaaatagatctatttaaatatatataaattatatatttaaatagatctatttaaatatatataaattatatatttaaatagatctatttaagtatatataaattatatatttaaatagatctatttaaatatttataaattatgtatttaaataaatctatttaaatatttataaattatgtatttaaataaatctatttaaatatttataaattatgtatttaaataaatctatttaatatatatatttaaatagaactatttcccttttttggagggtctctgggtatctagtcaaagagtagcatggggaaaataacatgactgagaaggacctgtggattctctccctaacaggttaccagcacaactttgacacctatgatgatagcttaatcacagacctcaatacaccctatgattatgagtctttgatgcactaccagcctttctcatttaacaagaatgcaagtgttcccaccatcacagccaagatccctgagtttaactccattatcggacagcgcctggatttcagtgccattgatttagagaggctgaaccgaatgtacaattgcagtgagtatctcagtttctgagaacttggtaaactagcctcagcagagattccatcagccttagagatttcctttacattttcctttactcttctttaatgtactagctaaaagaataagaacaaactgcgtaacttttgttggtctacctctagacccatttgtttaagtattgtctatggctgtttttgcgcttcaatggcagagttgagtagttaaaaacaaaaaacaaacaaaactataacagcaaccttacaggatggttataaaaaccaattatgtagttatgttttataaagtcaaagtactggacaaacgtaaggagatgttattgtctagcttcttttgcttcttttggagggtgcattattacgtaaaggtcaaaataggtgatggacttgaaagcattttgtatcctgtaaaattctttacttacgttagttattcctagagtaatctaatcctctggggcagggtgttttctaaagatgatccccctagcctttagagataaaatgtttgattctgttcaataagtatgtacaaaagacctactaagtacaaagccaaatattataggtatcttgttcttgatctaaaggagtttatggttggtatttacatggcagagaatgattatagttttttttatcttgactctgtgaggtaggtagggctgtgtctatatattagcaagtactaagatctgatgacagtaagatttgcatttgagaaaaagtcaagataacaagcttgtgatcctgtcatatctgaacaatgaggttttagtggcttaagacattagctatttggaatgactatctttcatttttaaccagatgataaaaatataatttgcagccacaactcacactcttttggaccactgtacttttgagaaggcaaacatctgtggaatgattcagggcaccagagatgacactgactgggcccatcaggacagtgctcaggctggagaagtggatcacaccttgttgggacaatgcacaggtcagtgaaagtggaaagcaaacacattgatgtggttcaccaggttcaattaggttatgccagccaccatgttttgcctcagtcagaatgttagttatcaaacttgaaaatctgaacaaggacaaaaaacatttcttatatcttcattattaactcagtaaaaagcatccagtctctgggcacacaaaagaaagatgcatttaagcaaaactgatattagtatatgattgataagataaaacctcataaataaaggcaatgtctctagaaccacaccctcctacagaaatataatgtgagtcacatatgtaatgtagaattttctagtgtccacatgaatctggctctgtggcacaatggataacacatgggacttttaatacctcatgaaaaagtaaaagaaaaccgtgaaattaattgtaataatgtattttttaactcaatatatccaaatagtagcatttcaacatgtaatcaaaataaaagttattatgagatgcttcacatttttcaggctaagtattttaaacttgacacatattttactcctacagtacatctcagtttgcactggccacaattcaagcactcaatagccacataggtttggtagccactgtattggatagcatagcttcagatacttcctatatatggtgtagtgaaaaagacagacctggtttgaaatatagcttcaccacttactaattgtgaccacaggaagttgttgtcatgtgtgtgctttttctaaaagtcttggcttttgcaagcctctgtaaacatcaagatattgatgtctacttcacaatgacaatggaagaagataatgcatacaaagcccccacctgcagaccagcagcttcactccccatttttccatcttccctttctctccagaggttccgtttattttgtttttctattttagccttctagtattctgtgcctgccattgaaatcatcttaaccctatttggaaacaggtgaggttacagattattatagcttttcaaagactagactattgcaaagtcacttagtccgtaactgtctgagagttggtgagattcccttcccagaaggaacacagcctgtcacccagataccaggccaccacagggaatgtcagaggtgataagccactgacacttttcctccatctttggaagagggtaaaagcttctgtcacagatcagattatcaaacatatcatcccaagtgtccaaaggttgatccaagcctgaagtgctctctaaatttctgttgtagcctctaatccaacctagtctgtgggcttgctgttaggctaatgtacaattgccagctaaacacaaaggtgatctttattgtgagcggaatctgctgaaaaaatgttctagtaagagaaaaggaccacagcccagaagaaagatctggaaaagctgtatcaggttaacttgagcagctattatgcttctttcacaagaggtatttaatggaacatgtccctctgctagagagctcttgcatagttacaggtggatgcgtagacacaaagagcttgaaggatccattgggaggatccctcccattcaaaacccacggaaataaacacctagggagagctggggataattcaggcctcctgagttctgggcttgaattatttgactctcaattcatgcttcataatacacctgggcaagaattcctgagtaagaattacctagaaacctttatagccttgtgcgctgttttttttttttttctaacccaggcattcaatatataattataattcagaggtctcaggcaagttcaaatattgagaagaagatacaagggaatataatttgccctgatttaatattaaagtcgtttgatattttaagcttggtgggaagcttatttaaaccatcattgcttgctgctgatatgaaaggcacgtgcctcagtgtgaggcaggatgaagctgggagcatcacggagcaacgctggagtatccagcactatactgtacactcactttatttttatcttgtgaaatgttttgatggaagcattttgatatggagttgagtgttggaacacagtataaagaacctcttcatatgcaagaatttttcattgtgcttgactttgacaagtgtgtggtttaccaaacggtacatttgtttggctgcttgactgtttttaggggaaagagttttgagatatctgagtcaggtaaaccctatctctggcactaatgtagacacttttcaccctcttcagtgtccttccaattccttcctttacattcaggggaaatttccatttagtctctaatgtgtcctgaatagcccttcttataatatagtaaagattacttttttgccactgataatacacccagttattaggctagcaacaggggaaattgaacccttattgtcaatgtttaaaaccaaatcctaaatctttgaattccagtgtcttatacaacaaccagaccaacccaactcttttccttggaatgaatctctaatttaaagaatgaagtcaatgagaaaaatagaattcatctcacagacacaaaattccatcaaacattgcttgaagcctgtgtttctttaagtcaaaggtatatatttcacaatcttggaacaaaggcaatcaaacacaacagtggagagcaagctttagccagtgactaagtccattgagacagagaatatttactgacaaatgtccttctttttattttcctccgaagagttctagtttttgttgcctggacaatggctgtggttcactatttcactttgtttgggtggacagaaccctggggtgtgggaagccagacgtgtgatgtttggctgctctttccataggtgccggctacttcatgcagttcagcaccagctcggggtccgcggaagaggcagccctactggagtctcggattctttacccaaagaggaagcagcagtgcctgcaatttttctataaaatgacgggaagtccttcagacagactcgttgtctgggtcaggagggatgacagcacaggcaatgttcgcaagttggtgaaggtgcagacttttcaaggtacttagaggcattcacacgaggaatggattgggttaaaatccgggatcctgcttcttctcctccttccctctttcctcctactcctccttcttctctctcctcctccttttcctccacccactttcttctcttctcagagcctatcataatatatggcatgttttaattactctatgaatgttttaaccactgagaaattagaagcagtatcttgggcttaggtagggatgaaatatacttttgtaagaagccaatcagaatatacaaatccagttttcactggaaatttagagaaagcaaaggccaagactgagaaaatggatggttcaggagtggagataagaaggtaaaagacctgtgcgaattgatgctgcgggagagagagtagttaaatagttgaccagctcacgcctggaatcccagcactttgggaggccgaggcggccttgtggatcacaaggtcaggagattgagatcatcctggccagcatggtgaaaccccgtctctactaaaaatgcaaaaattagctgggcatggtggcgcgcgcgcatgtagtcccagctacttgagaggttgaggcaggagaattgctggaacccgggaggcggaggttgcagtgagccaagattgcaccactgcactccaggctggtgacagagcaagactccatctaaaaaaaaaaaaaaaaaaaaaaaaaaaaaaaaaattgaccaaagtgttttgcatctgtttcagaaaaacaaatgataccattatttaatatgctgaagtaacttgaagcctacttgtgaagttggtggcaaataagtcattggtatatgttaacttcctataatcactaacatgttcctaagtgtcactttgtatatttatataagaaggtcagcatgtaaatgattatagatggagaaatttttgttgaaaagtaagaaagcctgtctcccttttcctagttatgaatgaaccaccaccataacaaaagaaagcaaatactttgtttataaccctggatcttgatttatggccagattatcctagcatccaactgcctaccttagcatttaatttatcaattgaaatgagtccagggaaaggaattattttttatatatctgctgctcttgaagaagaaaccttccttagaggtcacttgtaagaacaggtgcccaaatcgcctatatccaagccactctgtgggctgcctgggaactctacaaatcacagttttgaggggttcacttttctggttgaaatttattatagtttatatgataaaaggatgacagctagatactctttaagagttgaggatgtgttatgttaccaaggattgtaaatatttaatgagaaaatgagttagagtttcaataatattgatgggacctattatcactcactttcatctaaagctaaaagcgttacttctaagcataaaatcaatcaagcaaacatcctatgcttaatttagtttcttacactgctgtgctttgtgtttcattgaattcagagtatgcctgtgtacgttccctgggaacactgtatgaaaggtttttttaagtagtctgttctgatactggtttgtcaatgaaacttttcaaaaaggttagttgaatatcacttagtgttgtttatgtgatattcaacttaagacagtcgcaaccaatttgaatagcttttaagttttgcaaaatgtatattttgaccaaaacacttacacacaaaatgtctccatatgcatatctgtatataatatatgttacatacataatgcttatatacaaacttacatgaaaaatgttggcatacaactatgtgtatgtacacacacatgcacacacacacgtttttactgaggccaggacttccttatagaagacaattctgaactaacagggattaaatttgtctcaaacaatcgtagtagcattattgcctgactgatttagggcagccctgtggaagcatgtaaacgaaaccatcttaataatttcatagatgaatttctgcctatgtggtatagcctcttgggtctccttcccagtgccagattcccccatctcaacctcattttgacatcctatattaagaaaaaacaaagcaggtactaatcagcaagaacagaatcctattctcttgacagaattcccatgatctataacctgctggataaatagttcaaatcctatatctctgttcctattcctagactttctggcacctattacccttcaagtccatgtgtcttccactaggctgccatgctctccgcaggagagggcagctgcctagatttgtatgttacagaggtggtcgtgtgccttctctacctctctcctgtgttcccatgtaacctacctctctcctgtgttcccatgtaacctaaccacacaggccataatcagctccaccctaagaaacagaacattgttagacctgtcccttgaagttgtacttagagagaatggcctgaaaacacaagggagattaaaggtcttttccttttcagggaaagtatagttctataagtagatatctggttaaaagacacagaagaaggaaaaaagacactcatctgtaggaactcagtttagccaacatgacttccacttggaagcatttttcctctcctcttcaagcccaactctagggaataccctgtgcaaaaatatcagtgtaggcacatctctttgcggaattgagttgctttgctttcgcagtttcctctctccagtacccccaagctcctgtctggcttcttatactgttcaacccaggatcctatgttctagaacggccttctcaccatctttcctcagctcttaattcgaaagtcccacttctagttcatgctcagagaaaaagcaagtagacctaatctttattagaacgtgcatttccagacaatagtactctatttggcttactttgctcccctacatggtggactttcagataatataaggaagagaaaaaagtctagatgttggagagggagtcagttttaggtagggaagatccagtcagtcctacaggttattatctgctcttcagcattccttatagctctctggcaacaagtgacaggtcggaccatatggagttactattttttttacttttggcttagaaaatggctattttatatgattcagcctaacacttgggttttctttgctaaccttaggggttacagttgaaccagccaactcaggaggaaatccagaacctggattcttatagtggaaaacaaattcacggttaagatttgaatgtgaattttaaaataaatcatagtattttaaaaaacaatttttccttattaggtatgtaactttggaaaagttacttaaccagtttataacagtacctattttatagggctgttgtgaggatttaatgagataatttatggaaagcacatggcactgtgccaaactcataataagtactcattaagtgttggtcacagttctcaccagccttgttctctgtcctcaggagatgatgaccacaattggaaaattgcccatgtggtgctcaaagaggaacagaagtttcgctaccttttccagggcacaaaaggcgaccctcagaactcaactgggggaatttacctagatgacatcactctgacagaaaccccctgccccacaggggtctggacagtccggaatttctcccaagtccttgagaacaccagcaaaggggacaagcttcagagccctcgattctacaattcggagggatatggttttggggtaactttatacccaaatagcagagaaagctctggttacttgagacttgcttttcatgtgtgcagtggggagaacgatgctatcctggagtggccggtagaaaacagacaggtgataattaccatccttgaccaggagcctgatgtccggaacaggatgtcctcaagcatggtgttcactacctcgaagtcgcacacatctccaggtgggtggtgtcagcgcaaataagaactgccccttgaaccagagaggcccacagatgtgattctgtggtgcaagaaagagtaacgttctcctcacattgtctgtttgggaataccaataacatagtcttgttggagtttcaagtcaagattttcaatgccatcacatcctccttccctttcctaaattcactcatcaaacatctattgagggcttaccatgtgccaaagtcggtgctaggtacttagaatacaagtgaatcaggtgatccctgcctcactgagctcgttgtgattgaggaaatagatactgctaatcatttatcaaatacttggaacttgctgggctctgtgcagagctaatgtacttactcctaaaatagtactcaatgttactatgttcatgaagtaaacttacatcagtaaagaaatgggcaaactattttttttttttttttgagatggagtctccctctgtcgcccaggctgcaatgtaatggcgcattctcggctcactgcaacctccacctcccaggttcaaacaattcttctgtctcagactcccgagtagagatggggtttcaccgtgttgcccaggctggtcttgaactcctgagctcaggcaatccacccgctttggcctcccaaagtgctaggattacaggcgtgagccaccacgcctggcactaatttttttttttttcaaaagagaagacttaagccttagaagaaagaagccgtagctgtccctctcttttcattaagaaagtcgctcagtagcagacaactgatcactcagagctgtgattctctgcctctcccatctttcaattctgaattgcaattctcctggaaatagtaaatagcctaatttttttccaacactttttttatttttatatttatttatttatttatttatttatttatttatttatttatttatttctgattcacaaagccctgtatcctcattaaagacaaactggaaagtgaagtctaaagaggtaatgtgattttatgttacctacaactttgcagcgataaatgacactgtcatctgggacaggccgtccagggtgggaacctatcatacggactgtaattgttttagaagcatcgacttgggctggagtggtttcatttcccaccaaatgctgaaaaggaggagtttcctgaaaaatgatgacctcatcatatttgtggactttgaaggtacttttgttggtcttcctgagtaaataatcctatgctcttggcactctactgattttatcctgatttttaaagcacacacggagggtggggatgaggttaaaacaatgtgttgtaggagaatcacattttattcaattggtcaaggactcacatctttattttaattgtccttgaaagaaactgaaattttagtgtcatctttttgataattttatcagaggtaaccgttcactgatttcaatttagtttccatcagcctatccatgctaattttatgcttcattttgcaaattcaataaataaaaatgtgactggattactttaaaataaaagtagctaatactgtgggaatcagctggattcaaagccacttttccatgtcactaggggtgatgggagatagaagcaggctggggaactttcaccagaagtgggagttaattgtagtcagttactaatcctggatcttcctcatgactctctatttcctgaagatatcacccacctcagccagactgaagttcccactaaaggcaaaagactgagcccccaaggcctcattctccaaggccaggagcagcaggtctccgaagaaggttcgggaaaggccatgttagaggaagccctacctgtcagcctgagccaggggcagcccagccgacagaagcggtcggtggagaacacaggccccctggaggaccataactggccacagtacttcagagacccatgtgacccaaacccttgccaaaatgacggcatctgtgtgaacgtgaaggggatggcgagctgcaggtaggctctgtggctggggagacaggcaggccagcagacctgggccgtgtgcatgcttgctcctggtaaaggctgctgtttgcagagtagggcgaagactacctcagatggtcaactgaatgcggttttctttgactctacaaaggtgtgccctggattcatgggcttatgctgccaggacagaggcttcccaggtcaccttgtctcttgactttcaccccttttcccctcttctggggtattgtcaacagcatcttggatgttgttggaatttctaactctaacaacacccaagatggcttctagcctagggactttctactccatgagggtgggtctcaagaccaagcttaaatctttgctgactacagatgttattagttcctaattattattagttctatagtctgtcatttacactgtactattattacagttatattttcaataatagtagtaagaacacctgatatttctgaccccttgttatgcatcatgtagtctcctgagcatcttacacgcatgatctaaattcattctcactgccacctgtgacataagggctctccttatccccgtttagtgtgtcaagaagttgaagcttagaaagattaagtaatttatctaaaatgtacccagatggaaaatgctgaagctgggacttgcatctaggtctgtctggcagcacagtttgctatattttatagttctttttataatgtttgcttgcataaaaccctaaaaactgtttcacaaaaggaggtatgtgatgacagaagcaacagttccatttgaacagtagcagatgtagaagctattctgcctgcctcaaaaatttacatttcttctgagttctttttagtctccttttttttctctttttgtagcttttattttgaaataattttagacttacagatacaatgcaaaaatactacagaggttttctctataccattcacccagctttccctaatgttagcatattacacaaaccatagtacaattagcatagccaagaaatgaacattggtacaatgctagtaaataaattacaggccttattcagctcttcccagttttcccactaatgttctttttctatttcaggatccaattctggatctcacattacatttagcttttatgtctcctgtctcctaatcccctccaatttgggacaattcctcagttctttcttgtccttcattaccttgacactttcgaagattactggtcagggattttttttttttttttggttcatcttgttcttacatgattagattgaagtttcacatttgtggcaagattagtaaagatgtgctatgccttctcgctgcagcgtgtgaacaggtacatgatgcctatacatgtcattactggtgatgtcaaccttcattatctggccaacagcatgtccaccaggcctctccactgaagagttaccatttctccctctgtaattaatacgtatattgggagagatattccaagaccatggagacattctgcttttcctcaaatcctcacacactaatttcagcatctgttgacacatcctgctgcaatactcaccactgagatcttctaatgttgatttcctatatccttcacattcattaattataatctcctgtaaagaagaatggcaccttcaccccgttaatttgtttatgtgattgtttattcacatcacgaaggaatcataaacattaattttattcagtgggctctgttgcaataatttcatgatttattttgttgcttctattgtcccagctttggcctttgggagctcttccaggttggctcctgtgctctttcaacatcagattttatgaacacaatgttactttctggcaccataacatgctctaggctcatctttaatttttcctgccccacccatagaatcaatcactcttccaagaagccctctggttccttttactggggaaggcccatctgtttctgggctccaaagccataggtctgcatatctttgcctgacaggcccttagatgccagattccattatgtgtccccaacaggcttcatccttcccaggctaagggaggccagggctgccacttgtatgtcagcctccactcagccaaactattgctctcctagaaacctgcagctgagagttggcagaataagtttttctaaggtaacactaggggatatcactaagttgtgtttggagaggactgggtcagaaaaaaatgaaataaacttgctattactcactgatttctaagaagtcaattctcaggatagagatgaggccttggaaggtaaaatcattcaggattagtaaaagaaaatgctgacttcttattttttttttttttgagacagtttttgctcttgtcacccaggctggagtgcaatggcacgatttcagctcactgcaacttccaccccccgggttcaagcaattctactgcctcagcctcccgagtagctgggattacaggtgcccaccaccatgtctggctattttttttttttttttggtatttttagtagagatgagaccatcttggccaggctgatctcaaactcctgacctcaggtgatccacccggcctcccaaagtgctggtattacaggcgtatgccaccatgcccaaccagaaaatgctgacttctaattgtttcactctgctctgtagaattctgctgagtagaccttctagtaggaatgtttgaaacaaaggctggaattgttacaaaggtatggatgagacactacaagttatatgccttggttatgagattagttgatctttataccagataacattaagaaacaaaactaagggctggccattatgtgcttactctgtgttaaataccttgataagtacagtgtcctcattatctcatgtgaacttcagggcaacctcgtgagatagtgacagtacactaaccttatagtaacattttatttgatattatttagaagtttttaagttaccactgatgctctaagtcggtctatatctggggaatttcctttgtagcttatattctcagccagtgtcaggcaatgtattcctttaagtgtctcaggccttcctcctgagtccttggtggctgagagtcctggatctggaggcatacctcttgagattagatttcaagtgtgaaacacttactaacaatgtgaccttgagcaaattatttaaccttcctgtaagatgaagatgatgagaatggccaagtaatagcctccacctcaaagggttgttgcagggttaaattagttggtccatatacagctcttgaaatgggaccaggcaccacgtggacctgctcagtgagcgtttgccatttttattgctgtggagatgagtgttgctaggaggcacctgaggcctgggtagttcccacactcccttcatgtccttttccctcaggtgcatctctggacatgctttcttctacacgggggagcgctgtcaggccgtgcaggtgcacggcagtgtcctgggcatggtgatcggaggcacggctggcgtgatcttcttgaccttctccatcatcgccatcctttcccaaaggccaaggaagtgacctgcctgctggcattggccagaccacagcagcacctcctccatgcaggccttaactttcccatggtcaatgcagtttttatcagccttgctttggataggacctccaaggactaaggcctccagccccatgtgtgacccttgtcatctctctgccccacataattctgttactttgctatgtgctcctaatgtatctagtgtgtcctgtgacaacactcatcacacttcattgtaaatcacttgttttattgactgtctttcctatagactgtaagctccatgagggcaggcacatgttgttctcattgaccgtgctggccccagtgcctagatgcatggctggcacattgttggcactcaacaatggttgaatgaataaaacaataaatgaatgaataactaagatatagaaactctcatttatattgcagattgaatatatatgatgaaattcttatgttgaatatgttagaatcaaatactcatttttcattagatacagtagtgtcatcactcttttaagatcttgttaaagatttcaaataaaggtacttctgggcagccaggctgcacagcatttgctttcctctgagattctaagagaaggcctttaataaatttaataaatattgagttagca

SEQ ID NO: 688 - DNA, 1953 bp, Homo sapiens
gccagttaagaactcacaggtacttttccagccacccagataggagagatcattaaaacagtgcattctgtgctacctgacacctattggctttggtctgctctaaacttatccatctctgtccattactggaacaactccgcaaagtccttattccctaaaacatcactgataccattaaagccactaacagagactgaactcagaataaaggaaatcatagagaaactagatcagcagatcccacccagacctttcacccatgtgaacaccaccaccagtgccacacacagcacagccaccatcctcaaccctcgagatacatactgcaggggagaccagctggacatcctactggaggtgagggaccacttgggacagaggaagcaatatggtggggatttcctgagggccaggatgtcctccccagcactgacggcaggtgcttcaggaaaggtgatggacttcaacaatggcacctacctggtcagcttcactctgttctgggagggccaggtctccctgtctctgctgctcatccaccccagtgaaggggcgtcggctctctggagggcaaggaaccaaggctatgataaaattattttcaaaggcaaatttgttaatggcacctctcatgtcttcactgaatgtggcctgaccctaaactcaaatgctgaactctgtgaatatctggatgacagagaccaagaagccttctattgtatgaagcctcaacacatgccctgtgaggctctgacctacatgaccacccggaatagagaggtatcttatcttacagacaaggaaaacagccttttccacaggtccaaagtgggagttgaaatgatgaaggatcgtaaacacattgatgtcactaattgtaacaagagagaaaaaatagaagagacatgccaagttggaatgaagcctcctgtccctggtggttatactttacaaggaaaatggataacaacattttgcaaccaggttcagttagacacaattaagataaatggctgtttgaaaggcaaactcatttacctcctgggagactctacactacgtcagtggatctactacttccccaaagttgtaaaaacactgaagttttttgatcttcatgaaactggaatctttaagaaacatttgcttctggatgcagaaagacacactcagattcaatggaaaaaacatagctatcccttcgtcactttccagctctactctctgatagatcatgattatatccctcgggaaattgaccggctatcaggtgacaaaaacacagccatcgtcatcacctttggccagcactttagaccatttcccattgacatttttattcgcagggccatcggtgttcaaaaggctattgaaagactgttcctaagaagcccagccactaaagtgattattaagacagaaaacatcagggagatgcacatagagacagagaggtttggagacttccatggttatattcactatcttatcatgaaggatattttcaaagacctcaacgtgggcatcattgatgcctgggacatgaccattgcatatggcactgacactatccacccacctgatcatgtgattggaaatcagattaacatgttcttaaactacatttgctaagggataaatactatacaaaatcactaggaaccaatctctgcacataatcccacatgtattgtaaagtaagttttactcattttaggaactaaggaaaataaatttaaaagaatctgtttggggaggaaggctatgtaaggacaatgacaactgataagggatgcaaaaccaagagaatcattcatgaagaatgactataccatgcctggttctgatgctcgtttaaaatattaaaaaagttttttaaaagccaaaaaaaaaaaaaaaaaaaaaaaaaaaaaaaaaaaaaaaaaaaaaaaaaaaaaaaaaaaaaaaaaa

SEQ ID NO: 689 - DNA, 12963 bp, Homo sapiens
gaagagccctagagctttgctttttctctcctgcagcacttaaccgaaaccagttttgcaatcaattcctgttcaaaggccaccctactcttcctatccgtctttctccagcccagacactcacagccccctgccagaccaggggacctcggagaggcaaggacagaggttcaggatcttcctctccctcgggacccaaggccacaaaggagagctccgtggagagaaggtgagacggcgggcagaagtcgggggaggagggggctgccgctctggtccctgaaggacagagcccccaaggggttggctttaggcacctgactcagggaaaagagctgctgtgaaagcagcggggttcaaatgccagccagagcttgaggagagtctgaggattaacttctcctgtgttaatcctggtaggtttccctcccttacagccatttcagggttaaattgaaacatgctaaagcatgcgatgtgactagccaagttgcatttgtccctccactgctggggatccgagggcttaggcagaggggacctggcccttagaaagcagatgattacatcagccacaggcgtttccctagaaattcagtagaggagtggtttaggggtgtcatctcacaagaaaaaaggtgctgggtgagttgtctagaaactgcaaagccaacctacagagttttctagattgtagatttatgtgaagttgtttggggaagagggtgagggagtttgtgataaatattagggcgactaggccaggcgcagtggctcatgcctgtaatcccagcattttgggaggctaaggcaagcggattgcttgagcccaagagtttgagaccagcatgggcaacatagtgagaccccgtctctacaaaaaatcaaaaaatagctgggcgtgatggtgcacacctgtagtcccagctacttgggagggtgctgaggtggaaggatcacttgaacccaggaagtcaagaatgcagtgagcagtgatcgcaccactgcactccagcctgggcaacagagtgagacccggtctcaaaaaaaaaaaaaaaaatctagggaggttatcttgaagctgtgttttcaaagtaagcagatttttcttacttagattgtgtatctgcagaagttggttttgtgggggaaggcaggtaaggaaagactgtcataaatatcctgtaagctttcaaatgaaagtaagttctcaaatcctcttccaataaacctctcacaagcaaatcctctcgcaaccaccaagagcaggtcagaggggatggaatgggacctgcttagatgagtttcctgctgttacctttgccctgcatcccataggactaatgtaaaaaaatgagagaggtattggcggacgctggtaaaaaatggggttccagaccagagtctcttacccccagcaaccttgtcatgttcaaccaggtgatccctggttgtgggggctgtcctctgcatcgtagggtgcttggcagcatccctggcctctgccctctacataccaacagcagtaccctctccagctgagaccatcaaaaatgtttccagatattagcagtgtccctgaggagcaaacacgccctgtttgggaccaactactccagactctgcgtggctggaattgcacaggctttcctgcttactgtgtgacactggcctccctatgtctcagtttgcacctctgtaaaatgggcatcatcttagcaccgatctcactgggtcactgtgtaaagcaggtagatgtatgtctggtgaaagtaaactcttaaaggtgccaagccccctaaaccaaacctagcttcacataccaaagaggggagaaggtttttatctttgaagcattcattctttttcatagactaccccaaagaaataaccaaacatgtagacagacgtctatataaggattttaaccaaaaattataaatacaaaattttaaaataactgaaaacaacccaaaggttcaacagtgagagagttattgaatgtgtaatgatacattcgtaaaatgaaatgcgacatggcttctatgtatcgcctggggaactactaagatacaatgttaggtgacaagaattcacacaaactacatgaacagcatgcatttccatatggtgagcgtaaggtggattttataatttatttctaaattttcaaccttaaacttgtattcatggctataagtgaatgaatgaatgaatggctataaatgaatggctataaaaatttgtgtcctgggctgggcatggtggctcatgcctgtaatcccagcactttgggagcccgaggtgggtggatcacctgaggtcaggagttcaagaccagcctggccaaccttgtgaaaccccatctctactaaaaatacaaaaattagccgggtgtgttagtacgtgcctgtaatcccagctacttggtaggctgaagcaggagaatcgcttgaatctgggaggtggaggttgcagtgagccaagatcatgccattgtactccagcccgggcaacaagagcaaaattcagtctcaaaaaaaaaaaaaaatttttttaaaaataaagaatttgtgtcccttcagagtgtgtgagggaggatgtttttttctaactttttagaagtggaagggaagaggatgagagaagggaggatgagctgagggagaagctatatctaggaaacagcatttctgccgtaagcgctggaccaagtaccaaatgtagagaagagatgcaaaggaatgtattggcttccctagggctgctgtcagaaagcaccacaaaccaggtggcttcaaacaacagacatttagtgtctcacagttctggaggctggaagtcaaaaatcccagtgccagtagggcgcacttctgctgcaggctccagggagaccatctgtgccttttgcagcctcggtggcttctgacagcacgactctaatttctgcctctgtctgcgtgcagccttctttgctgtgtctctctctgtcacctcctcttcttataatgacatcagtgatggatttcagggccaccctgaatccaggataatttcacccggagaaatgtatacatgtgccatgttggtgtgctgcacccattaactcatcatttaacattaggtataactcctaatgctatccctccccactccccccaccccacaacaggccccggtgtgtgacgttccccttcctgtgtccatgtgttctcattgttcaattcccacctaggagtgagaacatgcggtgtttggttttttgtccttgcgatagtttgctgagaatgatggtttccagcttcatccatgtccctacaaaggacacgaactcatccttttttatggctgcatagtattccatggtgtatatgtgccacattttcttaatccagtctagcattgttggacatttggcttggttccaagtctttgctattgtgaatagtgccgcaataaacatatgtgtgcatgtgtttttatagaagcatgttttataatcctttgagtatatacccagtaatgggatggctgggtcaaatggtatttctagttctagatccctgaggaatcgccacactgacttccacaatggttgagctagtttacagtccaaccaacagtgtaaaagtgttcctatttctccacatcctctccagcacctgttgtttgctgactttttaatgatcgccattctaactggtgtgagatggtatctcattgtggttttgatttgcatttctctgatggccagtgatgatgagcattttttcatgtgtcttttggctgcataaatgtcttgttttgagaagtgtctgttcatatccttcgcccactttttgatggagttgtttgtttttttcttgtaaatttgtttgagttcatgtagattctggatattagccctttgtcagatgagtagattgcaaaaattttctcccattctgtaggttgcctgttcgctctgatggtagtttcttttgctgtgcagaaactctttagtttaatgagatccctttgtcaattttggcttttgttgccgttgcttttggtgttttagacatgaagtccttgcccatgcctatgtcctgaatgatattgcctaggttttcttctagggtttttatggttttaggtctaacatttaagtctttaatccatcttgaattaatttttgtataaggtgtaaggaagggatccagtttcagctttctgcgtgtggctagccagttttcccagcaccatttattaaacagggaatcatttccccatttcttgtttttgtcaggtttgtcaaagatcagatagttgtagatatgcggcattatttctgagggctctgttctgttccattggtctatatctctgttttggtaccagtaccatgctgttttggttactgtagccttgtagtatagtttgaagtcaggtagcgtgatgtctccagctttgttcttttggcttaggattgacttggcaatgtgggctcttttttggttccatatgaactttaaagtagttttttccaattctgtgaagaaagtcattggtagcttgatggggatggcattgaatctataaattaccttgggcagtatggccattttcatgatattgattcttcctacccatgagcatggaatgttcttccatttgtttgtatcctcttttgtttcattgagcagtggtttgtagttctccttgaagaagtccttcacatcccttgtaagttggattcctaggtattttattctctttgaagcaattgtgaatgggagttcactcatgatttggctctctgtttgtctgttattggtgtgtaagaatgcttgtgatttttgcacattgattttgtatcccgagactttgctgaagttgcctatcagcttaaggagattttgggctgagacaatggggttttctagatatacaatcatgtcatctgcaaacagggacaatttgacttcctcttttcctaattgaatgccctttatttctttctcctgcctgattgccctggcaagaacttccaacgctatgttgaataggagtggtgagagagggcatccctgtcttgtgccagttttcaaagggaatgcttccagtttttgcccattcagtatgatattggctgtgggtttgtcatagatagctcttattattttgagatacgtggcaaggaccttcttgctgtgttatcccatgacagaaggcagaaggcagaagggcaagagggcgtgtgcgagagaggtgaaggaaggaggctgaactctactactaccctcaatactcacaccaatttaccttcttctggtcaccaaaatatgtgagtttttttccctacaccaagcaattctccacttctttatgagaacaaacttggcatcctacagtttaactcaattctgacactatctccttggagatactatcagatcccccaggttaagggctcagtcccataagactgcccctacttcagacaccagttgtaagtggtgggtccccaggttgcccacaacttttgtccaacttggtgacacatggaaggtttccacaactccctcctcagtttcaataatttgctagaacagcttgcaaaactcagggaaacacttatttacaatgactagtttattataaaggatccaactcaagaatggccagacggaattgatgcacagggcaagatatgggggaagagacatggagttcccatgccctctctgggcacaccaccctccaggtacctccatgtgttcaccaacccagaagctctctgaaccctgtccttttgggtttctatggaggcttccttacacaggcatgatggattaaagaaactatgggccatttgtggttaactcaatctcccgtctctctcctctcctggaactcaaggggtagggctgaatattccaaccctcaaatcacatggttgtttccccagacaagcagccccccatccttggaggctttctaaagtcacctcattaacataaactcgggtgtggctaaaaggggtcggttatggttaagaaaagatgctcttttcacctttactgctctcatcgctcaggaaattccaagggttttaagagccctgtgccagaaatggggataagaactctctctctctctctctctatatatatatatatgtatatatacacacacacacatacacacacatatatatacacacgtatatgtaattatatatctatatataattataaatcacaatatcacaacatattatgttcttgggaatacaatttgtacaaaggggccttgtaaattactgctttgtttggtgaaaatgatcctttaatcattacagtctatgtggtcataattgtgagagaacagaataagctacccccagatatgcctctttggcatagggattattgaggcgaaggcaattaagaagcagcagatgcaggaaggttctctgtcctctctctatttgcctaaaagcaagatctaaatttacaaaggtctttctatcaaggagaataaaggttaaccactgagaactttagacccttataggcctggagatggtaccagaggaagctgcgtaacaaaacttactgactagtttctttctatccttcatttcctatttatttgtctacccacaatttggtggccctcaagatgcaaagtcttttttcttcatcttgtcccttctctaaaattgtatagttctttgttgaaggtggctatataagcagggagttccaagccactcctttgagaattatttattccctggtgtctcctacatacacttaagaggtacatattaatccactcctgtttgtttttctcttatgaatctgtcttgggttacaaggatcctagctgagaacttagaagggcagagggaaaattattttttcctctcttataatatccatctaaggaatcacttacccaggtcaagatggagaaaaggagatttccttgtacttcctcctcccagtcaataatcgcactacccgagaagaaacctcgattctgacttctacaaccaattcatttgcatattattgagtttcatataaatggagccatttgtttgatttctttcactcaataataatgtctgtgaaattattccatgttgtttgggtatcagtagttttcaaaattgttattgctatgtaatatttaactatataaaaaaactataatttgtttgtttattcttctgttgattgatgtatttgagttgttaccagcccttggctatgtatgggaggaaaagtaatttttttctcaaccctcataagttcttagctggaacagactcctgtaacccaagacacattaacgagagaaaaccaagcagaagcgtattaacatgtctatttcatatggacatgggagagatccagggattaaataattctcaaagaggtagctttgaattccagcttcaatacatctccaacaatgaacagtacatttttagagaagtagcaagacaatggaaaagggttttgagtctccagcaggagcaacttgtgggaaagtaagtcaatgtcatctttggtgatcaaactttatccttcttgttagtgaggagacaagggacagctttacctttgtcaatttatgtcttgcttttaggcaaatagagggagggtggagaacttttcttgtacccacttcttctcaattacatttggctcaaaataatccttatgccaaagtggcatattttgggatggtgtatactgctaccctccaatatagaggtaaaaatgtattgaactgactatttcactgtatgcatttattgtatgtaagctacacctcaacatacaattttcaaataatagtttgcaaatatttagtatgctatgtggttgttattttgatagtacataatccaaaatccctccacacctgaatttcataaggtttcatcatatgtgcagtaacgttgtttttctacattcctgaccagaaaatcatttgactcctggggacacagatttgctgccacagaggctgatggacaaccaggcggagagagaaagtgaggctggtgttggtttgcaaaggtaatccaaagggtgtagtccccagggagagggctgattctgttgaaatgctgcaggcatcctcacgataaggaatacatgtgctctgataggattagctgttaagtgggccttatcttaccgctggtctccattatgcatatgaaaatctgttcccctagggaaaaaaatacttcatggagctaaagtaaatattttggagagcaagtcaagattaagtcaggcgcatggctttgggcaataggactccaaagacaaaaattgctccactctggggcctcatctctgcaactgtcttgaagacaggaactccatttcttcagctcatatatcaccaaggaaggaagccatttggtgttaacaaattaatgaatttaagcccagttgtctgtaaatcagcagacgtagcaccaccggccccctgcacaatgtgtgcaagtaacaaatatttgctgagtgaattagacgaactctatgtgtaatatgtcatggaactggactgaaatgttatccaatgccagtagacatcaccagctgatacaggattcactggagcagaggtgttcacatgtgagacgcttggtttaattaagaaacacatgaagtcaagcttctgttagttatcaaccatgctaaaaccaaaaactttacagttcatacacagtggcgttgttgatctttgcagctacatatctatttgctgtttctttttgtctagcataccttgaggaaacacagagatcagggtgggctaacctatggcatcttttatgtctggggttctttgtcagggccaccccgcttgccttcatcccaccccttccccattgcaagccctggtgaccttctgctctgttaactgatttacacctgtggattaatagataattgtgcctaaatttattaattcattaacacttaaaacatatgctcgatggtatatttagtttctaatctttcccactgaggaattgtgtgcgtgtgtgtgtggaaagagagatttaaagataaatacatttatggacatacatatacttcaatgaggaggccctgacatcaactgacaggtgagaggaaaggcagaaagcaccaagtttaggactcagagcccacccaatgctccatctttaccttgcatgttcctttgggagtgtcctcttttctctctgggcttgaggccccccactgaatcataaaggaggtggcccagatcctctccaggcctccctccagctctgatgttcttctttgggccagggcatctgttatcaccaggcctcctcggctcaccctgaaggaaatgcacaaatggcaccttgcatgagaaaatgccccaagcagcaggctttgctctcaccctgatgcagctctgccttgaaggtcaaagccaactggcctggcaaagatcccttcgtacttcatcctgtaaaatgttggaggaagaggggcctaggtctctttgtcccaaacttcttccatgaaggactaatcccatctgcttgaagggtcaagtaaagctgaccaagagcaaggagagcattcaggacatgaataataatttatctcaactctcaatgtgcaactcctgatagaagcaaagacacaccccagagtaaccagattcgaggtcattagagtggaggatgtatgatgcaatatggccccctccaccctcctactcacttctacacatctgggacgctcatcccctgcccaccaccttgtcttctctttctcctacttttcccagaactctcccgccattgttcccaagttctttatcttgagtggggttttaacatttccccactgcccctcctctgcagcagtgctgtgctttctctgaacaaggctgaaaacatacctcaggacttaattttccttccccattccttgaccaaggctggggtgattcacatttgtccttccacatgcccctcttatgtgtttcttttttccatggaaccagtagttttcagcgaaggctgaactactctacaatgctctaggacttttcaggggattttgtagggaggtacagggaggattcgaagctgagagtggcaagaatatccaagagccacatgggttttcccatctgggaagctgaagcaaaatctttatttcatttctcctcagggatgaggatgacgctcctctgtgtgaagacgtggagctacaagacggagatctgtcccccgaagaaaaaatatttttgagagaatttcccagattgaaagaagatctgaaagggaacattgacaagctccgtgccctcgcagacgatattgacaaaacccacaagaaattcaccaaggctaacatggtggccacctctactgctgtcatctctggagtgatgagcctcctgggtttagcccttgccccagcaacaggaggaggaagcctgctgctctccaccgctggtcaaggtttggcaacagcagctggggtcaccagcatcgtgagtggtacgttggaacgctccaaaaataaagaagcccaagcacgggcggaagacatactgcccacctacgaccaagaggacagggaggatgaggaagagaaggcagactatgtcacagctgctggaaagattatctataatcttagaaacaccttgaagtatgccaagaaaaacgtccgtgcattttggaaactcagagccaacccacgcttggccaatgctaccaagcgtcttctgaccactggccaagtctcctcccggagccgcgtgcaggtgcaaaaggcctttgcgggaacaacactggcgatgaccaaaaatgctcgcgtgctgggaggtgtgatgtccgccttctcccttggctatgacttggccactctctcaaaggaatggaagcacctgaaggaaggagcaaggacaaagtttgcggaagagttgagagccaaggccttggagctggagaggaaactcacagaactcacccagctctacaagagcttgcagcagaaagtgaggtcaagggccagaggggtggggaaggatttaactgggacctgcgaaaccgaggcttactggaaggagttaagggagcatgtgtggatgtggctgtggctgtgtgtgtgtctgtgtgtctgtgtgtatgtacagtttacatgaatgttcctcaggacatggcatacaatggccttggaggtccaaataatatcaagtacatcttggagatgagggtgcctgtcctggacagacctcggcatgccttctgtttctccttcaatgctccttaaggcctatgtgctgggaaaagggtcttccctgtttgtttgtttgtttgtttgtttgtttgttttgagacagggtctctgttgcccaggctggagtgcagtggcgtaatctcggctcactgcaacctctgcctcctgagtgcaagcaagtctcctgcctcagcctcccaagtagctgggattacaggcacgcaccaccacgcccagctaattttggtatttttttgtagagacagggtttcaccattttggccaggctggtctcgaattcctgacctcaagtgatccacccaccttggcctcccaaaatgctgggattacaagcgtgagctaccctgcccagccgggtcttcccagttttaacaaagaggtcacagagccacaggcggagttaggaactaaattgtctcctcctcccaattcatatgttgaagtcctaaaccaaaatgtggctgtatttagagatggaccctttgggaggtaattagggttgactgaggccatagggtgaggtcctaacccgatggaattgacttctttataagaggaggaggaaatacaagagggcctccccacccctgctgcacacctacactgaaggaaggctatttgcagatgcagcaagaaggcagccatctgcaaggcagaagaagagagccctcaccaggaactgaataagtcagtcagtctgggacttccagcctctagaactgtgaaacaataaatttctgtggtgtaagcaactcaatctatagtagtttgttactattttgttatagcaaccaaagatgactaagccagacaggttatgtcactcgccaagtgtcttagtctgtttgtgctgctataacaaaataccttagactgggtaatttacaaacaacagagatgtatccagagatccacagttctggaggctgagaagtctaaaatcaaggcaccagcagattccacatctcgtgaaggctcactctctgcttcacagatggcactgtcttgctgtgttctcacatggcagaaggggcaaacaagcccccctgggcctcttttataaaggcactaactctatgcctaaaggcagggccctcatgactctatcacctaccaaaaggctccacttctttatactattggaggggtagaaggaacttcctttctagaccttgaaggtttaagaatttgaatctataaaacaagctgacaatagacagattaacaggagaaaaagcatatacattttttaatgtgggccagatggcagaagcttaaataacaccccaagctacaggaagtgaggcctctgatggggaggtagtgacacaggctgtgggagggggtagggggaggaagtctgtggtgagcaaagtttgccttattacactgataaagtgtaattacactaataaagctggatcacctgaggttaggagtttgagaacagcctggccaacatggcaaaaccctgtctctactataaatacaaaaattagccaggtgtagtggcagggcacttgtaatcctatctactcgggaggctgaggcaggagaatcgcttgaacccaggctgtaaaggttgcagtgagccaagatcatgccactgcactccagtctgggtgtcagaatgagaccccatctc

SEQ ID NO: 690 - DNA, 11557 bp, Homo sapiens
ctctgcccattgggaaacacctctctatgactctataaatgtccaaggtggccccaagggaggacttctgcagcacagctcccttcccaggacgtgaaaatctgccttctcaccatgaggcttctagtcctttccagcctgctctgtatcctgcttctctgcttctccatcttctccacagaaggtagggcagcccccagggtgcagatccctgagcaggatttcagcatctgggaagactctgatcaggatttgttggagggcaggccttggcgggcaggccttggcaggcagtcctgagccccggaaagatgggctctttctcctgaacctataggtttggggctcaggactgcctgcaggtggcttgggggttccattcacagcccctgcacccccaaatacatacccagcctaagtaaagtggtgtgttcgccatgcaaacacacatacaacctctcagctagattactgtgcttaagtcctacctatctagaatttctggagccattctcttgtacttgtgtcatgcttggaacagagtaaattagtgttgggcaaatgaatacattaattagtagaccatctaagtctgaacatcccaaaacctcatgcccagaaaatatccatgagcagctgaaatgaaggtgtgtgtggtagggaggtggggtatgtttatgcatgtttagaaggggacaccatctttttacctctatagatatgaatatttagctctcttgcccttttttcttttttctttttttttttttttttgagatggagtcttgctctgtcacccaggctggagtgcagtggcgctatctcagctcactgcaatctccgcctcctgggttcaagcaattctctgcctcagcctcccaagtagctgagattacaggtgcccaccaccaagcccagctaatttttgtatttttagtacagacaggtttcaccatcttggccaggctggtcttgaactcctaacctcgtaatcctcccacctcggcctcccaaagtgctgggattacaggcgtgagccaccatgcctggctgcctttcttgattcagatagctgagtgtttcaatccatttttctcttgtctaaccctctagaaactgcctacatttattttttgttttagtggttatggttactcaaacttttgggtggggggagctggagctatagaaatatataaagagaagaaaaacactcaattccatgattcaagagtagccatgttcaacattttgtttatttccttgcatgtagaatttttaaaaattaattgatgtacctatatgttcaaggttatatcttttttatttatcactatatatattgttataatcacccaaaatgcttatgattgaagatattctggaagcatttacaacccagtgtcagcagcagccatctctgagtagtgggattataacaagtgtttgttttacaaagtttctgcgatgaaaatgtgccacatatataataaggaaaacagtgattagaattcctcataaacacagcccgtgacatgcaatttatcagacctctatttttggacatgttggaggttgccagtgataccctagtgacaattaaatgaggatagataccttcccccataaagtttcctatccatttaggactatctgtagcaaactcttgaagtagcattaatcaactaatattttcaggtataacttgctacaagtgaacgtactatgatgaatttacatgcttagacatttagatagttcacaattgtgtgcttttccttttttgaagcaagatcttgctctcttgcccaggtcggagtgcagtggcatgaccacggctcagtgcaggcttgacttccagggctcaagcaatactcgcacctcaggttttccagtagctgggaaaacaggtgcgcaccacaatgccctgctaatttttaaaattttttgcagagacgaggtctctctaagttgcccaggctggtcttgaacttctggactcaagccatcctcccaccttggcctcccagagtgctaggatcacaggcatgagccaccacacctggcctactttgcacattttaattatgtggtaaaaggtatatatgtacataaagtatgtcctttattcaggctttttttctttttttcttttttttatttttttgagacgaagtttttgctcttgttgtccaggctggagtgtaatggcatgctcttggctcaccacaacctccgcctcccgggttcaagtgattctcctgcctcaacctcctgagtagctgggattacaggcatgcaccaacatgccaggctgattttgtatttttagtagagatggggtttctccatgttggtcaggctggtctcgaacactcgacctcaagtgatccgcccacctcagcctcccaaagagctaggattacaggcatgagccaccacacccagctcaggcttattttcttaggctagattgccaaggggagaattattatgtcaaagaaactacttattggacaggaatctgaaaaggatgtgttttggggccatgtgtctcccaacattgttatttctgaaaagtaaatcacaacaaggcccactctttccctaggacctctcgtagcctggctcatcctgagtttctctggataaatattcctgagccctgtgccttggaaggggaagctcactcacagacaagcccactaaagacagtctctcttcctttgtgtccaccctcagggaagaggcgtcctgccaaggcctggtcaggcaggagaaccaggctctgctgccaccgagtccctagccccaactcaacaaacctgaaaggtaagtacccccacctcgtccagactgtggggcagaagttctacagtggccatgggaccagccacacacactgatcagcccccacccatggctggcatcaggctctggctgggaggacatctttgttttgttgattaatttgttgactcccccccaaaagtcaacaaattaatcattttaaactgaatacattctgccatggaaaaaaagcaggatgcaattagaagatgttgtgtggaaacacacttactttaggtgggaggtgtctgaggaggtgacatttatgagacctggctcatttatgagccaggagcctggctgaggactgtggaggtgggggatgcaggcagaggaggcagcaagggtgaagggcaagagtggggtatggaagacagatggtagcagggcttgagaggtactcccagaagctaaggaccaaagctgcctgtgaaccctgtggacctggggcacagatcagcatgcaggtcaccagcaggggagtgggcctgagggtccagagagccatagcttggcaggagataaggcagccccagagatgccagcaggcagcatccaggctgcatgaccagaacgaggcccagaagagcaaggctgccctctccctgaggcctggggacactgggaggcctgtggcggacaggcccaagctcaggagggctgcgggcacccagttccctgcacaggggctgcaggcccagagcagatattcactggagttgcccagcccaggtggaagggtcaggctgctggagcttgggtagggcaggcagatccccaaggggagactgtggaccctgagtcagacagcctgacaccaacctggggctcctgcctgaactctgcagccccagtgcccactctcaagaggctgaggaggtcccggccccacttgctcctctgcggccatggcccatggggtccatgaccagcgccggagcctccatgcctttcccagctaccaaggggatgctcagctgtgatgcaggagagggatagagggaggaagcaagacagcatgactccagccgcagaccttctcccggagatgctgacagccctttcttccaaactggcatcacacccagccggccaggataaaaataaccagctctcacacacctcttgctgaaccagtgtgaggtgccagcccaggcaggatgcagggtgagcgcaggctgtggctctgctcccccaggcccctggttctgtgaaagaaggtgaaaaccttccagagagaggtggaggcgagccccaagagctcacaccctccccctccacttcccctctcctgcaccaactgctcagaggcaggaagttgagggggtgtgtgagcccccaccacagacacacacacaacaaaccaaaacacataaacacaaatacctacacacataagtagatacacaccacacaaccacacacacagacacacacaaatacatgcgcacacagactcacaccacacactacagacacacagacacatacacgctacacaactacacacagaaacacagcatatacacacaacacacggtatagtgatacacacctagacacatatacacagcacaaacacacaccacacaactacacacacagacacatactacatgcactctacacacacacaccacgcactatacatacaaacacacggacacatacacactacacaactacacaaacagacacacactatacacacaaacacactacatgcacatacacactacacacaatcatacacacatagacacatgcacacagcacacacacgtataccagacacagacacatacacaagtacatctacacacaaacacataccacacaactatacacacaaacacacataaatacatacacacaaatacacaacactacacaactatacacacagacacacacacaaatacatgcacacacagacacacaccacaatacactcacagacactacacatggacaagcaattacacacacacactacacaactacacacactacactcctatgctacacacagcacacacacactacacacacagatggacagatatacacccaagcacacacagtgcataggagacgtggccatgttaactcccgtgcaagtacacgtgcatccgttttttcagttttgttacttctggagaataaatctaggtgtgtggcttctgtgctgagactggatttctttctgtgtgtatatttttaaaattccattgttgaaatttatgaacaacttagaacaagaagagcaaaacaaacatatgtattgggtccttgccatgtgatctcatttaaatccttgagaccaccgtggggaggtctcgtcaccattatatagattgggaaactgagactgagaaagaaactgaggcagagtcagaaactaggatctttccacctctttccactacaacaaactgcttcccctgtggacagaaagtgttctgtagccggtgtatgaagacatgcgcgtgcaagccagacggctgacttcccagaaggaaatagccatctgggctgggatctcagctccaccacccactggctgtgccttggagcaagtcacccagcactgctaagcctcagtctccccctctgtgaagagggagttataatagaatctgcctcactggaccatgatgagccgtcgatgggttcatgtctatacaggacttggcatcaagcctgccacatggtgccccgtaaacatgtcctgctgttgctatggagacagacccagccctgccagggctgctggcacaggagatgagcaactccaacaccgacaaccaaagcctgcacgttcttgtccaggcttggtggttccaccttctgtcttatggactgatgctgggattcagcaaggagggagatgaatcagtgttcccagggtgttgtgtaagcaacgccaggattgctgagtgtgccaggctccagaaatctggcctcgtgtgctccagttcactgatgtatgacaaagcccgtgcatctgtctgtagaaatgcaaattaactcagagttgcctagagggtgttcctgagccaacaacaccagctatgacacacacttgctgaatactgactactcctcgttctatggtgtctttcttgagtactgctttatatctcagcactgtggtaggcccatggggatgacaatatgtggaaggcccaggactctgggtcaatgggacaaaaacatcttcaaaaatcaacatgctaaatggctgatttgctgaatttattacatttaccaatttgctttaaaaaggctttttttttttttttagtatttattgatcattcttgggtgtttcttggagagggggatttggcagggtcataggacaatagtggagggaaggtcagcagataaacatgtgaacaaaggtctctggttttcctaggcagagggccttgccaccttccgcagtgtttgtgtccctgggtacttgagattagggagtggtgatgactcttaacgagtatgctgccttcaagcatctgtttaacaaagcacatcttgcaccgcccttaatccatttaacccttagtggacacagcacatgtttcagagagcacagggttgggggtaaggttatagattaacagcatcccaaggcagaagaatttttcctagtacagaacaaaatggagtctcctatgtctacttctttctacacagacacaataacaatctgatctctctttcttttccccacatttccccctttcctattagacaaaaccgccattgtcatcatggcctgttctcaatgagctgttgggtacacctcccagacggggtggcggccgggcagaggggctcctcagttcccagacggggtcgcggccgggcagaggcgctcttcacaactcagatggggcggtggggcagaggcgctccccacatcccagatgatgggtggctgggcagagacgctcctcacttcctagacgggatgacggccgggaagaggcactcctcacttcccagactgggcagccgggcagaggggctcctcacatcccagacgatgggtggccaggcagagacgttcctcacttcctagacggggtggcggccgggcagaggctgcaatctcagcactttgggaggccaaggcaggcggctgggaggtggaggttgtagcgagctgagatcatgccactgcactccagcctgggcaacattgagcactgagtgaacgagactccgtctgcaatcccggcacctcgggaggccgaggctggcagatcactcgtggtcaggagttggagacaagcccggccaacatggcgaaaccccgtctccaccaaaaaatacgaaaaccagtcaggtgtggcagcacgcgcctgcaatcccaggcacttggcaggctgaggcaggagaatcaggcagggaggttgcagtgagccaagacggcggcagtacagtccagccttggctcagcatcagagggagaccgtgcaaagaggagggagagggagaggcctgggctcagcatcagagggagaccgtgcaaagaggagggagagggagagggctgggctcagcatcagagggagaccgtgcaaagaggagggagagggagagggagagggagagggagaagggcttttttaaaaaattaaatttttttttttttttttaagtagaggcagggtttcaccatgttgacctgactggtctctatctattgacctcgtgatccacccacctcagcctcccaaagtgctgggattacaggcgtgagccaccatgcccagcctaaaagagtatttagaaaatttatagcaatctgtatagcagcaagtctttttgttgttgttttttaagaaacaggatcttgctcagtcacccaggctggagtgcagtggcacaatcatagctcactgcagcctcaaactcctgggctcaagtgatccgcttcagcctccccagtagctgggactacagatgcgtgccatcacactcagctaacttttctatttttgcaaagacagcgtcttactatgatgcccaggctggtcttgaactcctggcctcaagcaaccctcctgccttggcctcccaaagtgctaaagcgctgggattacaggcgtgagccactgcatctggcccagttcttttaaaggaagtttcaatgtgctgactctattggctctttacgggtgtcaagcactatccccaagcccaggggctgcccaggcttaagctggggtcagactgatggctgtgaaggccccaccagccaggaagtactgtggtcctgaagcttcattcaggccaccttctttctacgcatcctggggccacggtgaagctatttgggaagactggggaggtcctgtgggaagtctggagcctgagaggctgcccaggtcctgagagctccttgccccctcactgtttttgaaacccagcaaaatggctgagcccatagtgggagactcaggctggaaggggcacagagagattcctccctcgccatagggttgtctctgccttcaggaaggagctcggactgcatgaacaaatgttacccgttgaggatatgaggttttcagcaacgatgataccaggatggacatgagggcccagaaaatagaccctggaaaggaggaggtgaagagggctggcagcccatccttcccagtggctcagtgaaaggggcctcagacccatggtcttgctccttgtgattatatctgttagccatagctgcagaacaacccactcccaattttagtgacccaaagcagtgtttattcttttcaatgagtctacaggtcagctggatatttcttctagtcttggctggactcattcttctaagatttggataggcagttctgctgatcttggctggggtctctcatatttttgatgtctgtgagtctagaatggtctcggttggaacaactagcctctcctccatgtggtctttcatgctcttcgcaggcgagcccagactgttcacgtggtgtctgcagagttccacttatgtaaatggaaacacgtaaggcctcttgaggtacaggctctgagcttccctccttcatctctaccacattcattctggacaaaacaagttgcaagtccagtccagattttaggagcaggcaaatagactccctatcatgatgggagaaactgcaaaggagagagggagaattgcaaccatatttgcaaccagtcaaccacaaaatttattgtaggagccagagaagatagtcttgggatctgaggtgaggaaaggaggtggaggaggatcaggggtcaggaaatcatgtgtctccaccagaaatgctggtggaaaatgctcatgaaatggtaagttatggaatggaaaagagtaagttacgctatatattactaggattatcactatgggaagatcaaagcacttaccaatagaaaaaaaaaaacagaaaaacacaccaatattatcacttatttgtggttaagacatgagtggatggatgaattataattaaatttatttctttgtatagctagtgcttatatagcaattactaggtgtgggtggcacttacatctgctaactcatttgatccttacaataatcctaaaagttagatactattactattctcacttctacaaatgaggcaccaagcacagaaaggttaagtaacttgttgaaggtcccacagctactaagtaagtgatagattcaggctttgaatttaaataatctggctcactccagatttcatgatcttaattaccacaccacatttcatatagtaataatctgaaaacagaaggagaaagaataatctcatgaccataacttagtaacccttctcattcatttgtgtgtcctttgtttttcgtacaaacgtgtttacctggttttatttttaattaattatatctcattttttaatttttaaacttaagtcggaatcatttttcttcttgttgctgtgcagtgttcataaccacagggttttgtccccatgaaacatttccatcatcatgaattatcattaattttttattttattgtttattatttattttttttttgagacaaggtttcactttgtcacccaggctggagtgcggtggctcaattatggctcaccacagcctcacctcccaggctcaggtgatcctcccacctcagcctcctgagtagctaggaccacaggcgtgcgccaccatgcctggcaaatttttgtatttttggtagagacggcatttcatcatgttgcgcaggctgttcttgaacccctgggcttaagtgatccaccagttttagcctcccaaaccgctaggattacaggtgtgagccactacacctggccaaattatcattactaattaacaatttctctattataggatattcagattgtttccagacacttttttttctgcaattaaaaacaaaactatgggccaggcatggtggctcatgcctgtaatcccagtactttgggaggctgaggcaggaggatagcttgaggccaggagttcgtgactagcctaggcgacataaggagactcccatctttcttgaaaaaaaaaaaaaaaaactataaaaatagtttaatgcatgcagctttttctttcttgtggatgattcctcccataaatgggactggtttgtcaaaagatgcaaatgtagttttgggacacgttgcctggcatgtgccatctggaaggagacagccagagggcccaagggcacacatccatgtgcagaccctcctaccagagtcattagaaacaggcctcccagacctaaggcagcttaggtgggctccacttaggatcagccaccttctcttcctcttctaccaatcaattaggttccctctgatgggactgaaataatctgggctggtcttgtttgccacgaaaagccccttctgggcctccagggaaaagcataagatctaattcttgctttgaaatttttttttaaatgtgtttgaaaatgcaacttaattgtgttttcctctctctccccacaacctggctctgacctcgccatcttcctgtccttgtccctcttgtctactcattgctcctcccaggacatcatgtgaggctctgtaaaccatgcaagcttgagccagagccccgcctttgggtggtgcctggggcactcccacaggtgtagcactcccaaagcaagactccagacagcggagaacctcatgcctggcacctgaggtacccagcagcctcctgtctcccctttcagccttcacagcagtgagctgcaatgttggagggcttcatctcgggctgcaaggaccctgggaaagttccagaactccacgtccttgtctcaattgtgccatcaactttcagagctatcatgagccaacctcaccccacagggcctcagtcgccaccatgtgggcctctccagtgcaaaccaccgagcattccaccatgaccggtcacagctacaaatccagagaccatcaatcctgctagagtgcagggtggcaagcacccaagggtggctgaccaagactgcagagtctcctccatcttcaggtccattcagcctcctggcatttaactaccagcatccagtggtccccaaggaatcccttcctagcctcctgacatgagtctgctggaaagagcatccaaacaaacaagtaataaataaataaataaactcaatgcagacaca

SEQ ID NO: 691 - DNA, 21204 bp, Homo sapiens
aaagctctgggccccagggaggaggctcagcacagagagtggaaaacagcagaggtgacagagcagccgtgctcgaagcgttcctggagcccaagctctcctccacaggtgaagacagggccagcaggagacaccatggggcacctctcagccccacttcacagagtgcgtgtaccctggcaggggcttctgctcacaggtgaggggaggacaccctgggaaggggcggaaagagggcgcacagagaatggctagggtcctctggggaggatggagctctaagaggggacagagggcttctcttggagccaaataggagagaggacatgaaagggatagagatcataaaaggaaagtctcagtgatctgaaactgttagtgaataaacaatctcccattttttaccttttccaactgaatcatcaatgagcaataaatttcaaaaactgctgacaataatcacaatttaagtcagcgtgacaattaaggaaaacattttaaaaggggcattaaacagagccctgagccaccaacctcagatattggcaaataaaccccaggacatgaagagccctgggaatgctcactaactcatccacaggagtctgcagcctatcccaggcactggggtgcaaccaacatcacacaaatccctgccctcacggagctcacgctctcatgggtggggaagacagacaagcaaagagatctagaatgtgaggtcaggtgttgacaagagccctggagggaacagagcagaaaaaggtcagaaagggaatacccagggtctctaggggaggtgtcagggaaaggatctcccaagagcaccctgatgtgatcaagatctgagggcagtggggagggagccatgcggatccctggggaagggcattccagagaaatgacaaggtcagaggcactaagggaatgggagtcacactgctgaccttgacccagtaggacacacacacacacacacacacacacacacacacacacacacactccaaggtggaggggtgaagacacctgctcaggacccaaggccccatttttctaccctaatgcataggtcccaatattgactgatgctctctcctctctcctagcctcacttctaaccttctggaacccgcccaccactgcccagctcactactgaatccatgccattcaatgttgcagaggggaaggaggttcttctccttgtccacaatctgccccagcaactttttggctacagctggtacaaaggggaaagagtggatggcaaccgtcaaattgtaggatatgcaataggaactcaacaagctaccccagggcccgcaaacagcggtcgagagacaatataccccaatgcatccctgctgatccagaacgtcacccagaatgacacaggattctacaccctacaagtcataaagtcagatcttgtgaatgaagaagcaactggacagttccatgtataccgtgagtatttccccatgacctctgggtgttggggggttagttctacttcccacacatgggattgtcaggcctgggctgtgcctgtgtcctcctctgcattataccccatgttaaggtttgagcatctagtgcaggacacactatgggacagacatcaaaataccgaatgtcttactctggagtcctgatcctgcagacatttgcttcagaggaaggacaatctgatgtgggtaacttatcgaggggagaccagtctcaatctagccccccgggaccctcctggtgaacatgtccctaagaaagacccagtaggactcagtcagggtctggcctgaagggccttctgggatcctcacagacaagctcagccctgggaatcccctgctccaaaacactatcccaaggttctcaactcctggtgaccctgaggagcctgggccagggctagattgtggcctcctgggcagggctgactaggaacaagaatttgagctatccgagggctgtggctcctggagctggtaaccagccagggttcaggcactagagcctcatttgggcaaggatggagcctcatccttcaccttagtctcagcctggagaggacagatggacaagctccccaggccatcagccaactgccctgggggcttaggagatgccataggaagtttaccatccccaggaggaggaacagaggagacaggatgctcctgaaagctccttgtccaccagggatcaggctgagaggcactctcagggaatccaacaacaatagatgctgcggccgggagcggtggctcacgcctgtaatcccagtactttgggaggccgaggtggatggactatgaggtcaggagttcaagaccagcctgaccaacatggtgaaatgccgtctctactaaaaatacaaaaaaattagccgggcatggtggtgcgtgcctgtaatcccagctactcaggaggctgaggcaggagaattgcttgaacctgggaggcagaggttgcagtgagccaagatcacaccactgcaccctagcctgggtgacagagcgagactccatctcaaaaaaataaaataaaataagattgtttatttgggcagctcccctatgcagagctgaggtcaaataattataaatattttaaggttaattcacagaccacaagataagccaaaaccattaaccatttatactatttcactgaggggaaactgagccacatggcaataaatacagtcactatatcaaggtcacacagaccgtaactggaagatcagttacaggagatttgtcttcagccacagtcttaacctctcctctactccaggggccttatttggcatctgtggaccccaataccagagttggttcagttcctttcttcttaggcatctgcagcccagaggggagatcctggtctggggagtgagatcaaatggagaattaaccaagttttattctggaacttattcaacaattagagtcagtgtcagaaatgttcaggcctgggtcaggtgtggtggctcacacctgtaatcccagcactttgggatgccaaggtgggcggatcacttgaggtcaggagttcaagaccagcctggccaacatggtgaaaccccatctctactaaaaatacaaaaaaaattagtcgggcatggtggtgcgtgcctctaatcccagctacttgggatgctgaggtggtagaatcgcttgaacccaggaggcagaggttgcagtgagccaagatcatgtcactgtgctccagcctgggagacagagtgagactctatctcaaaaaaaaaaaaaaaaaatgttcaggcctatcccctcagacccacacctctgctccctggacttgaaatcctgtgtttcctgatgtgttggtgtcactcccacaggaggataaaggaaaggactttgctttctctcctcactcacaccctgcaccagccagggcccaatatgaaacacacactcagtagttctctcacgaatgaatgaatgattgaatgatccataacctctttagagactggatctggttgcagaatcctgggaggttcttgccatacctgctccccatccctccagagactgagacccatgttccatcccctgaccatctacccctaaagccaccccaagtaccatatttcatgtgactctggggctgctcggctgtgggaaggttttcagggctccctggtcttggttctgggacaccagaggctcctggttgctggggtctctaaggtcacttagcccccactgctcactgtcatgggcatctctgactctctctgctcctccatgtcctcattttcctctccttttatcccagctgaactgcacagtttcctccacccttaggcctttcccagacactccgtctaacaaggttgactgtcctgttcccttcccgctcacactgtggccaggcccacctcccaggcaataggaaaggcacagaaatgagcccagagcagccacccctgccaggtccatcataagccactgtccccacgtccctcagtgaggctgacatgtggaacaggccaggggacagggacgagcgactcctccatacactctctatactgactcaccaggggatcagaggcagaaggacaggtctgcagtccccaaagcccatgggctcatttcacccatttgactcctaactccatccctgttctgctgtgggctcacatcctctagtggttcctgggaccttccccaggtagagctagccaggcaggtgctgtctgatgggtttgctgcccattccacctacacctgtgtcctcatgatgacaccattgtcataaggtgggatctctcagacagggagatgcattagccactggtgtctcacttagactctgcccaatttggatgaatttggtcaaactctagttgtgtttcctgaggttgagagaaaaggaagaaagcatttcacatgactgttttgggttcctctttttacctgaatttccacaggaatttgtaacatagaactctttctaaatttactaacataacatacatcacttctcctcatatggcatcgtttctctcttaatgcaattgagaactctcagatatcctttctgacaagttctgtcttcctaacaggacccatgagtcccttctacccagggagtcactgatttcaaactgacttcagcatctttctttgatcataacatgatcctactggacttcagagcttggtttaagagtttatcacgctctctagagaatattcctcttattaattggtgttagatccagagtattaataacaattttcacaaatggaataatttaacttctcaaatttatatcccagatctaccaaacacacacggtccatgagggtcaggctttcagcaagttcatgctccttccgttccactagctggttattctgcatttgcaaaaaacccacatatttcagaaaagatccacagtgtcatcatctgctcttttcagggggaaaagggacattaaagaccaaagacaaggaacgtagatatgctgttaaatccaggcagcccctgcctgtcaccctcactcttttctagatcattccttggactctgctctatctttagggggtcactggctcaagtcagtcatcatcaaacacctgggaaaaactgccccaccttgtggttctgctgcctgacgactgagctaccttcaggcttgcccctggtgtcccctgttatttctgctgaaacatacagtcccaggccaggctgctcagtatcctcagggtttaaggacaataggaagtcccatcatcacccatctctaggatgtcctcagacagggaagctgcagagaaaacacacctagtggggcaaagtaggactgtgaagctggaagggacccagcacctgtatgttccaggtgaggacccacaggtgggtcaggcaggcatcagccagtcagggaaggaccagaagtgcctggggctgtgactcccagtcctcggtctgtccacgacccaacactgctgctcagttcacacttgagaaagtctgtgcttctctcacacagagcaggcggcctcacggtctctgagccctcagatcattgcacatctgtcttgtgaaacacacacttgccatgggcttttagggacttgggttggctgagaggtggggagatgccaactctgattgaaaaatgcccggacggaatcccagcactttgggaggccgaggcgggcagatcacgaggtcaggaggtcgagaccatcctggctaacagtgaccatcctggctaaaatacaaaaaactagccgggcatggtggcatgcacctgtagtcccagctactcaggaggctgaggcaggagaatcgcttgaacccgggaggaagaggttgcagtgagccaagatcgtgccactgcaccccagcctcagcaacaaagcgagactctgtctcaaaaaaaaaaagaaagaaagaaaaatgcccagccaggcacggtggctcaggcctgtaatcccagcactttgagaggccgaatcgggcggattgccagagctcaggagtttgagaccagcctgggcaacacggtgaaaccccgtcaggcatggtggcatgtgcctgtaatcccagctactcaggaagctgaggcaggagaattgcttgaatccaggaggtggaggttgcagtgagccgagatcgtgccattgcactccagcctgggtgacagagcgaggctccatctccaaaaaaaataaataaataagaaaagaaaaatgcctgtggaggaatcaaaggtgccacacagggcaatcttctctctgttttctgcatagcggagctgcccaagccctccatctccagcaacaactccaaccctgtggaggacaaggatgctgtggccttcacctgtgaacctgagactcaggacacaacctacctgtggtggataaacaatcagagcctcccggtcagtcccaggctgcagctgtccaatggcaacaggaccctcactctactcagtgtcacaaggaatgacacaggaccctatgagtgtgaaatacagaacccagtgagtgcgaaccgcagtgacccagtcaccttgaatgtcacctgtgagtatcttctgttcctctgtggcccaggctgccagcccaaatccacgcagccagaggccaggcctctcagtccctctcaggtctaaggacgcagacccttaaccctggacacccaggctggccatgacttcctttccccaggcaaacctgggcagccccagcctgaaccaagaataggaggggagaggctgctcctgtcctgggaggctcagggtccacagcctgtgatgggagaaacaggtgaatgtctcagacccagactcagtggacacaatggaggtttggttaggacttcagggttgtgacttagtagagaggaacactgtggcccttctccagaccagcagcttccccttccctctgatgacatcacctgtggctttattctctttgctccagatggcccggacacccccaccatttccccttcagacacctattaccgtccaggggcaaacctcagcctctcctgctatgcagcctctaacccacctgcacagtactcctggcttatcaatggaacattccagcaaagcacacaagagctctttatccctaacatcactgtgaataatagtggatcctatacctgccacgccaataactcagtcactggctgcaacaggaccacagtcaagacgatcatagtcactggtaagtaattcctggagcatcaacactaagatctggggtacaagctttctggttttcaaataggagcagagaagaaattttcttttgcagcctgtatccaacaggcacaaacaagtccaaattctcccctgaaccctctcaattcatctgtgcagactctcttccctttgtttttctgatttctcacagctgaccttaggtccagcctggaatgtggggagggggttctctcagccccagaaagccccgtgtagcaggaggggcttcacagagggggaagcagaaagggtcctcaaggtcaatttgcttctgtcactaacatgtccctttctgtaacttcttggccttcttttacctattccatgagatataaggaatatgtgaggttttaaaacagactcacaatagttttccctaaatgagagaaggaaatgcccttcatcagggatgagcagctcagactctgctccctgctctactcccggcttgcccggtgattggctctgccctgatcccatgtggggtaggacgcaggtgtgtgcagaaggtgtccaggtggcctgtcatgaatccagctaaatcaagatggcagtcaatggctgggcgctgtggttcatgcctgtgatcccagtactttggaaggccgaggtgagaggatcacctgaggtcaggagttcgagaccagcctgaccaacatggcaaaactccatctctactaaaaatacaaaaaaaaaaatttagccaggcatggttgcacatgccactaggcatgccactagggaggctgaggcacaagaatcacttgaacctgggaggcagaggttgcaatgagccgagatggcaccactgcactccagcctggacaacacagagagactctgtctcaaaaactaaataaataaataaataaaggcagtcaacacctgagcctcccctgggtcaggctgcctccctgagcttgtcctggctctgaagtcaccagctgtatgaggctgtgggcacagcacatgggatagcacagagcacagcgagtgacccacacttggagaaatcgggagattcagccacaggggctctgcattggagagaatgggcaatgccaaacagcgtgtatttgtagagaaggtaagaatatcagccttttgttaacactgtgcctactctaggaatctccttcaccgtgatattctatccacagaccaggaagtaaaactcctctttacagtgggaaatccttcggattggaactccagatagtaaggtcatgaagactggatggggcatcatcattccctaaaaaattatttaatgaaaaaaaacactaccttcccttttgtatgtaaagtgacagtcacaggaaggatgcctgatcacagctccaggaaagggtcagtgggaggccaggcacagtggctcacgcctgtaatcccagcactttgggaggctgaggcgggtggatcatgaggtcaggagatcaagaccatcctggctaacatggtgaaaccccgtctctactaaaaatacaaaaaattagctgggcatggtggcacatgcctttagtcccagctactcgggaggctgaggcaggagaatggcttgaacccgggaggcagagcttgcagtgagctgagatcatgccactgcattccggcctgggtgacagagcgagactccgtctgaaaaaaaaaaaaaaaaagtcagtgggaaaaacattctacctgatgatgaggttgctcggtctgtgcgctgagaagaagattccaagtggagatatagagatatccagagggtcactctgagacgatctggggtcaggagggaggtgcagccctctccttacaattcatcacctgaacaaagacactcgaccttctgcagagggtcagggctatcccctggttggtgacctttgcacagctcactgtgggacctgagagctggctaaaatctcagggaaaggagcatagccctaggccccaggccccaaccctattctcagtaggttatctcagatactctgcttgtccacagagctaagtccagtagtagcaaagccccaaatcaaagccagcaagaccacagtcacaggagataaggactctgtgaacctgacctgctccacaaatgacactggaatctccatccgttggttcttcaaaaaccagagtctcccgtcctcggagaggatgaagctgtcccagggcaacaccaccctcagcataaaccctgtcaagagggaggatgctgggacgtattggtgtgaggtcttcaacccaatcagtaagaaccaaagcgaccccatcatgctgaacgtaaactgtaagtgactcctcaccccttcctatatgtccctctaggattactctgtcaatggtgtgcaaaatggataaaactcacaggaggcagaatatcaatgaagagaccattatagcaaacagaattgcaaagtggttaagagctcagctcaggccgggcacagtggctcacgcctgtaatcccagcagtttgggaggccaaggcgggcggatcacgagggcaggagatcgagaccatcctggctaatatggtgaaaccccgtgtctactaaaaatacaaaaaaaaattagccgggcatggtggcgggcgcctgtagtcccagctactcgggaggctgaggcgggagaatggcgtgaacctgggaggcggagctttcagtgagccgagatggtgccactgcactccagtctaggcaacagagcaagactctgtctcaaaaaaaaaaaaaaaaaaagagctcaggctctgaatcaaatatacatatacttagttggttttttttggttggttgggtttttttgtttgttttgttgttttgagacagggtctcactctgtcacccaggctggagtgctgtggtgtgatcaaagctcactcccgcctcaatcccctgggttcaagcaatcctgccacctcagcctccagagtagctgggactacaggttgcaccaccatgcctggctaagtttttaagtttttttgtagagttggggtttcactgtgttgcccaggctggtctcaatctcctggtctcagcctcggcctcccaaagtgctgggattacaggaatgagccactctgcccaccccgtatttaactattctaagtacctctcatacagatggaagcatgcaatatttgtccttttgtgtctggcttacttcatttagcacaatgtcttcaagctccatctatgttgtagaatgtatcagaatttcattccttttggagactgaataatattatgctgtgtagatagatacatcacattttgcttatccactcatccatctatggacagttaggttgcttccaccttttggctattatgaataatgctattacaaacatgggtatacaaatatctgttcaaatccctgctttcagttcttttaaatagatactcagaagtggaattgctggatcaaatggtaatcctgtttaattttgaagaaccatcataccattttccacagtggctataccatttcacattcccaccagcaatgcactagagttccaatttctctacatcttcaaaaacatttgttgctttctggttttgttttgttttttataatggccatcctaatggttataaggtggtatatcattggagttttgatttgcacttccctaatgattagcaatatttagcatcttttcatgtgcttatttgccatttatcttctttggagaaatgtttattcaagtcctttgcccatgttttaattaggttgtttggggatttttggttgagttgcagtagttctttatatattttggatattaatcccttatcagatatatgattctcaaatattttctcccattctataagaagtcttttcacttttgtgataatgtgctttgatacacaaaagcttttaattttcattaagtccaatttctctacttcttctttcgttgcctatgcttttagtgtcatagccaagaaatcattgccaaattcaatgttccaaagttttcactctatcttccaagagctttatagttttagctcttacatttaggtcttttatgcattttgaattaatttttatatatggtgttacataaaggttcaatttcattcttttgcatggatatccagtttcttcaatgccatttgttgaaaagactatcctttccccactgaatgatcttggcacccttgtcaaaaaacatttggctatgtatgcaaacatttctttctgggctctatattttattccactggtttctatttctttttgccagtaccatactgttttgattactgtagcttttggattttgtttgtttgttttattgttgttgtttgggtttttttgttttgttttgtttttttgcttttctttgtagagatggcgtttcaccatgttgccaaggctggtctcaaactcctgagctcaagcaatccacccgcctccacctcccaaagtgctaagattacaggtgtgatgattaccatagctttgtaaaaaattttgaaaccaggaagtgtgagcccttcaactttgttctttttcaagattgctttggctatccatggtcccttcagagtctatataaattttagaatgaatttttctatttctgcaaaaaatattactggaattttgatagagattgcactgaatctgtagatcactttgggtagtactgtcatcttaacaatattaagtcttctaatccatgaaaatggggtgtcttttcaatttatgtcttatttaatttcttttggcaatgttttgtattttcagggtacaaatctttcacctctttggttaagtttatttctaagtatttttaaagctcttataaatagaatttttttcttaattttcctttgaattgttattagtatacaaaaatacaactgatttttgcatgtggattttgtatcctgccactttgctaaatttattattctaacagtttttttgtggaatctctagggttttctatatataagttagtgtattctgcaaacaggtataattttacttctttccaatctagatgctttttttttcttgcctaattgttctgtctaggtcttccaatactacattgaatagaaatggcaaaagcaggcatccttgtcttgttcttgatcttaaaggaaaagttttcaatctttcaccattgactatgatggtagctgggggttttcacatgtagcatttattatgttgagaatttccttctattcctagtttcagtgttttttagcatgaaagaatgttgaattttgtcaaatgcttttatcgactcattttcattactggttataggtctattcagattttctatttattcatgattctatcatggcaggttttgtgtttctaggaatttgttcatttcatccaggttatccaatttgttggcattcaattactcatagtactcttataatccttattatttctgcagaattagtagtaatgttttactttcatttctgactttagtaatttgaatcttctttctttcttagtcaatctaattaacagttgtcaattatagtgatcttttttgaagaacaacttttttttttcggtttgagacaggttctcactctgtcaccgaggctgatcatggctcaccacagcctcaacttcccgggttcaagcaatcctcctgcttcagcctcctgggtagctgaaactacagacaagcactaccacctccggctaatttttgtaattttttgtagagacagggtttcaccatcttgcccagctggtctcaaattcctgagctcaagtgatacacctgcctcagcctcccaaattgctgggattacagtcatacaccactgtacctggcctacagttataaatttctttcttgcacaagattcttaactactctgagcctcggattcctcaaccgaaaattgcactgtgaatgcctgctccatagtattgcacgggtttggggtttttgttttgtttttgagacagggtgtcactctgtcacccagactggagtgcagtggtgcaaacacagctcactgcagcctcaacctcctgggctcaagcaattccctcaccttagcctcctaagtagtacatactaccacatctggctaatttatttttatttttgttttcagagagacagaatctcaccatgttacccaggctggactcgaactcctgggctcaagcaatcctcccatctgtttcccaaagtgctgagattacaggtgtgagccaccacgcctggccccatagtgttattttaaagatttaatgtaataataaaccttcagcaaaacaccacacacagaggaaatgtttcataaatgttagctgctattactactactattatcattagccttgaaatcaggtagtcctagggtcaaatctcagatccacctctcactagccatctgactttaggtaagccttttaccactctaagcttccattttttcatgtttaaaatggaaataatgtctacctgacagcactattttatggatcaaataagatacatgtaaagcatttagcagcacagggcctggcacacaggaagtactccacaaaagtagctaacatagcattagtcaccagcctgagttgactggtgagggttaagccccaaatagttgcaacagatataaacaagaaataggctagacacagtggctcacacctgtaatcccaacatttgggaggccgaggctggaggatctcttgagcccaggaatccaagaccagcctaggcaatatagtggaaccctatctctacaaaaattatttttttttaattagccaggtgggtgggcgtggtggctcacgcctgtaatcccaacactttgggaggttgaggcaggcgggtcacctgaggtcgggagttcaagaccagcctgaccaggatggagaaaccccgtctctactaaaaatacaaaattagccaggcgtggtggcgcatgcctgtaatcccagcaattcaggaggctgaggtaggagaatcgcttgaacctgggaggcagaggttgcagtgagccgagatcacgccattgcactctagcctaggcaacaagagcaaaactcggtctcaaaaaaaaaaaaaagaaagaaaaaaattagccaggtgtggtggcatgtgcttatagtctcagctactgaggagactgaggtgggaggatcacttgatcccaagaggctacaatgagccatgattgtgccactgcactccagcctgggtgatagagtgagaacctgcctcaaaaaaaaaaaaaaaaaaaaagaagaagaagaaatagatgcaaaaggtattatttatatattatatatatatatatatatatatatggagggagaagcattatacaagaaacccactgggacatggctatgatcaaatatgggaaagggggaaaaaaggaggtaaagcaaagtctcaagcctggtatgttagtttccatctactgagatacagtgaagatgggattaaacatacgagataatttattggggaaaatgcctgtgagggaaagtaaggcgagagtgagaggaacctcagaccatgatgcagatctgattcctgtggaagagaaagagaggaaggaagttttagattgaagtgcagtttttgtttgtttgttttttgagacagagtctcactctgttgcccaggcttgagtgcagtagtgtgatctcggctcactgaaacctctgccccccgggttcaagcgattctcctgcctcagcctctcaagtagctgggattataggcacctgccaccgcacccagctaaattttgtatttttagtagagatagggtttcaccatcttggccaggctggtcttgaactcctgacctcgtgatccacccgcctcagcctcccaaagttctgggattacaggcgtcagccaccgcgcccggcctgcagtgcagttctaagagcatttctgcaaggctgacagggagtcctccagccattcacacttcagaataaaacagtcacacaaaactgggctagctttcatacccctgctgggagcctgtgggaagccagttctctatgcaaaagaggtggtgaattcagaatgcaccaactgccacaactgagacactgagaaaaagatgcaaccacgaaaaaggtggaaagttctaatcacatacaaaatagcaatcagcctttctcatatttcaaagccttaaaaatggctgagcgcagaaaagccagggtggaattggcagaagagagatcatcaacctagaaacatggtgactggggttgggcgcagtggctcacgcctataatccaagcactttgggaggccgaggcaggcggatcatgaggtcaggagttcaagaccagtctgaccaatatggtgaaaccccgtctctactaaaaaaatacagaaattagccaggtgtggtggcacgtgcctgtagtccagcctgaggcaggagaatcgcttgaacctgggaggcggaggttgcagtgagccaagatcatgctactgcactccagcctgagagacagagcaagactctgtctcaaaaaaaaaaaagaaaagaaaaaaagaaacatggtgattgaaaaaaaaaaattgcaaggatatagttagctaatcaccttccagcaaccttcccacaacgaaactgtattccttgaaggaacaattagaaactacttcattctgagagttgtttcccagcccccattgtaaaataatttcactttcatttcttctcctcttttctctccatgacagataatgctctaccacaagaaaatggcctctcacctggggccattgctggcattgtgattggagtagtggccctggttgctctgatagcagtagccctggcatgttttctgcatttcgggaagaccggcaggtatgatggcctttcctcttgttctgtttcctccaaggctgactgccatgcttgggagagggaaagaattctttgcctgtctctgggcctggatctcatactcctcccactaaactcctgcttctcggcactaattcccacaggtttcctcttccctggtcttcgtgctccctgtctcccattatctcttggacatgggtattccaatccccatctaatctagaggaagagactcaagtatgttcctctgtcccctagtcagggaaagcaaggtctaagaaggaaaacaaatgaaaaaatgaaagaagcagcaggagaaagcaagtcatgtgctctgttgaccacattggaagaggagggagaaatagcataggaagagaacctaagagaaagcaaaaacaaccaaagtcctcttgaacaataaatagagaaaaaaaaaaaagtatctaccccggaaaacaaaatgggaaaggttttaaggatagaagtaggcacagaagcagctgataaagaatgaaatgaaatgtgaacatccagcaaacaggaaaagagtaaacactagaagggattgtagttagactgaagaacgaggccctcagaagaaaggcagtatgaacatcaaggactctaaggaattacctgctcacagtgtccttcctaacttacggaacaaagatcctgtgcttgggaatagcagtcacagtttctgatatttatttagggcaagcgaccagcgtgatctcacagagcacaaaccctcagtctccaaccacagtaagtaaagccacttaccccagtgagaactggtatgttccaccacgtgccctcccctggcagggaatcctggattcccaaaccactccctcccttctgaattttcacagaaaggatctctatttcccaaccctaaggtggcataggtcttcccacccttcctagccacaggagtcccctgagacacatctgaggagagaggctcactctgcctaggccaggcaggcctgaggaagatcccatgtttccaggagccatttcctcagccttactccttccgcctcctgcctctattacggatgtgggcactctcccttggtgagactttccttatcttgtgggtgctgtgggtgctacaagtctcaatgcccctccttgccactggagcatgttgctgagaaacacatctgggcaaaaatcaaggccttgtgaactggtagaactcttcacaagtggattgtggcctcctgtggttctgcccctgccccctctctggtactaacatgctgggtctggaccatacactctgagggaagtaaattccttaactgatccttaaactccccaccctccaactgccacctccttcagctagaatcacctgaagtcagctttgcatttccatggatcgctaactcttcttttgcttctccagctcaggaccactccaatgacccacctaacaaggtaagcatagccggttttcatgggcttattttctcatggaaatgattctgtgtagaattgattattcatgaagacacaatgtaacatcaagtttgggttaatgttcctcagtgcaacaacaaagacgtatttgtaatcactcccatgagtctactttgcagcaagaacatgcattttggaattattcccatcctgtgtctgaatactggatgtgactcttagtagctctgtgacccttgtcaagtaacttaacctctttgatcatcagctttgtcatctgtaaaatgggcattctgcctacttcaaagagaagttgaagggattaaacgagataacctacaaagagcacccagcacaatggcctaaaaaaggaaggcactgaatcattctcactcccctaccttcagtctgatcctgctcttattgtcaaaaggataatttcaattttaatagatctgagatcctgttttttaataataattttatagaatttttcattttatggccaggcacagtggctcatgcctgtaatcccagcactttgggaggccaaggcaggtgaaacacaaggtcaggagatcgagaccattctggctaacatggtgaaaccccagctctactaaaaatacaaaaaaattagccagctgtggtggcgggcgcctgtagtcccagctacttgggaggctgaggcaggagaatggcgtgaacccaggaggtggagtttgcagtgagccaagattgcgccattgcgctccagcctgggcgacagagggaaactctgtctcaaaaaaaaaagaagttttcattttaccttttcaatagagcaaacatacatactgaaaagtgctaaatcataattatactttcacaatgtatgaactttcacaagttgaacacacccaggtaagcagcacccaaatcatgaaatactacatgacctccccttaaaaagagacccttccagccaggtgcagtggctcacacctgtaatcccagcactctgggaggccaaggcaggtggatcactagaagtcaggagttctaaaccagcctggccaacatagtgaaaccttgttctactaaaaatacaaaaaattagccgggcgtggtagtggatgcctgtaatcccagctacttgggaggctgagacaggagcatcgcttgaacccgggaggcagagcttgcagtgagccgagatcgtgccattgcactccagcctgggcgacagagcgagactccgtcgcaaaaaaaaaaaactctaccagtcacttccctccaaagaggagtaaccactatcctgacttctaatgctccagattagtattgcttggttttgttcctatctaaaggagaaataaaacatatccttatatgtggcttcttcaacattgctttgtgagactcatccatattgtatgtatttgtggtttgctggttctcattgctgcattatcctatcccattgcatatataccataatttctctcttctaatgatcattcatcaggaggtcagcaagcagagaatgggtaacaacaaaagcccttctccagagctaaaatttcaaaatggtaacagcttgtggtgctgaatcacaccaggcaaggtgaggccctgccctgtgtcactgacttaactgatcattatttgtgcttttcagatgaatgaagttacttattctaccctgaactttgaagcccagcaacccacacaaccaacttcagcctccccatccctaacagccacagaaataatttattcagaagtaaaaaagcagtaatgaaacctgtcctgctcactgcagtgctgatgtatttcaagtctctcaccctcatcactaggagattcctttcccctgtaggggtagaggggtggggacagaaacaactttctcctactcttccttcctaataggcatctccaggctgcctggtcactgcccctctctcagtgtcaatagatgaaagtacattgggagtctgtaggaaacccaaccttcttgtcattgaaatttggcaaagctgactttgggaaagagggaccagaacttcccctcccttccccttttcccaacctggacttgttttaaacttgcctgttcagagcactcattccttcccacccccagtcctgtcctatcactctaattcggatttgccatagccttgaggttatgtccttttccattaagtacatgtgccaggaaacaagagagagagaaagtaaaggcagtaatgccttctcctatttctccaaagccttgtgtgaactcaccaaacacaagaaaatcaaatatataaccaatagtgaaatgccacacctttgtccactgtcagggttgtctacctgtaggatcagggtctaagcaccttggtgcttagctagaataccacctaatccttctggcaagcctgtcttcagagaacccactagaagcaactaggaaaatcacttgccaaaatccaaggcaattcctgatggaaaatgcaaaagcacatatatgttttaatatctttatgggctctgttcaaggcagtgctgagagggaggggttatagcttcaggagggaaccagcttctgataaacacaatctgctaggaacttgggaaaggaatcagagagctgcccttcagcgattatttaaattattgttaaagaatacacaatttggggtattgggatttttctccttttctctgagacattccaccattttaatttttgtaactgcttatttatgtgaaaagggttatttttacttagcttagctatgtcagccaatccgattgccttaggtgaaagaaaccaccgaaatccctcaggtcccttggtcaggagcctctcaagattttttttgtcagaggctccaaatagaaaataagaaaaggttttcttcattcatggctagagctagatttaactcagtttctaggcacctcagaccaatcatcaactaccattctattccatgtttgcacctgtgcattttctgtttgcccccattcactttgtcaggaaaccttggcctctgctaaggtgtatttggtccttgagaagtgggagcaccctacagggacactatcactcatgctggtggcattgtttacagctagaaagctgcactggtgctaatgccccttggggaaatggggctgtgaggaggaggattataacttaggcctagcctcttttaacagcctctgaaatttatcttttcttctatggggtctataaatgtatcttataataaaaaggaaggacaggaggaagacaggcaaatgtacttctcacccagtcttctacacagatggaatctctttggggctaagagaaaggttttattctatattgcttacctgatctcatgttaggcctaagaggctttctccaggaggattagcttggagttctctatactcaggtacctctttcagggttttctaaccctgacacggactgtgcatactttccctcatccatgctgtgctgtgttatttaatttttcctggctaagatcatgtctgaattatgtatgaaaattattctatgtttttataataaaaataatatatcagacatcga

SEQ ID NO: 692 - DNA, 304884 bp, Homo sapiens
cgcggtgaataacggggcctggctggaggagaaaggaaacctgctgcgggaggcggcggcgaccggccagggagcgagggaggagagttcacttttacttcagtgtcagcgcgcggcggccgtggctggctctggcgagagagcaccgagggagtgggtcgcagatcttcgggcggctaggggaaatcggcgagaggcgggatccgagcgcgccggcggggcgcagagcccgcgagcctggccagcgagggtagccgcggggggcgcgccccgggcgggcccccggagacgcgcaggatgccacacgaagagctgccgtcgctgcagagaccccgctatggctgtaagtgcgccgggcgcgcggggttcctgctggccttggggagctccctccccgaggacggcgttggagaagccgagggagccggttgcgcggcgcagaggaaattggaaggcagcaactgcgcggctggcaaagttgggagctggagttgcaaagggcagtgaatcgcgtccccccgctcctcccgccccccaattcctaatatccagctggcaacccagaccctccactccgcatacccaaacggggtgcgcgggcagtgcggggattgcgctctgggacagaccaggttgggattttaggggtatcaggtgaggagtccgcggagctccgggtcgccgccggcttgggccagggggtggcgtaaggcaccggattcttccaacccagaaggggaggaaagtttgtttgctgtggctacaggtgggcaccgcaagtagggcgccggcgcactctgctagtgcaaagccggcttgactggaagggcgggagtctcctcctgtcccgcgccctcgaacttcacctgacccgctagagccattggcctcacaggtgtaagtccctcccctctgaaaccccccaacccctttcccccccgctcccctcgcgcgggaggattgctgtgtggagaggacgcggcactaggctccggggaatccggcgggagcccgcgtgacttgaacgagatggtgtcgattacccagccaggggctgccctcggaaataggttgctttggccgatcgtgagtggatggagccagattaacaccaaccacgtggcttcatgtgcagagttcagagtcctaaacatgtgccaggaagcatttcctttaaaacaaacagaaagttggcctgctgtctctccaaggtggccctgtcagtgaacccaaggccgaagaccacaggttaatctttgcccaggctggccttggtggcagaggtaccaggtttgggttaaggtggtgataccttcagcagggtgttttgtttgtgtgtgtgtgtggttttggatggtgcgtaaggccactgacttgcttaactgaaaaagggctcctcaacttgtgtaggttctttcccctcctccccgctggcgtgtcaaagatgggaggttatctttcctgtgttacccttgcagtgagggggaggcctgaggactacagcctctgtactctaatgcattcagcagttgactgagacccagctttttgccttttggtaaaccacacagacagcagagcctcttgggttcaagagggaacgctgtgctcattcagtgtttgcagtgccaacctcaggtgggacccagctttttgccttttggtaaaccacagatacagcagagcccgttgggttcaaggaggaatgctgtgctcattcagtgtttgcagtgccaacctcaggttggtggaagtactttaatgtgaccagctctcagaatatatggtggcttcactgtgtcaaatgataagataaccacaaacttctgcaaactaggtgaatctacatgaacaaatgatttcttgctatcacatgattgatgtcggccctcatgagcaataaatagtgcaaaatttccgtgaatgtggtacatgaatgcagcatttctgtcagtccctgcatgtgcatctgtgatgctgcttgattttcacggaataaatctgtgttttaagtgcactccagaagaagctatcaagggagtccagatctggcaagcctgaagcccactccacagggccgctttctttggaaatcttcatccagctttcttcaccaatgtggtgtaagggggtggtgtgccatcttgttggaatcactcccggttactttccctccactcatcaagtgctggcattcaagttggtcacttaacactgtcaaaatggaaaatatttgcctatgtttccagactttcttgtcaccctgaaatattaaggctttaatatgacagttatctcattaaaatgaacacttttataattttggtttatgaatggtgtattttcagtgtattcagaacatgatatctagcagaatagattttggcgttaataggcattacctaacattacctattcatgcagaagagggctatttggtgtgttagtgtaatttctggttgttgttggctttctgagcctcctatcaacatgagactgaaaatcgtgctgtgagctcttcatgggaaggctagggaaggataacacaggattgtccttgctctgttgtgttctagggctgtgctttttcttgtttattggtttggtaaatacagtttcagtaaaacctcaaattataagaaacaggtgttacccctagcatttaaaaataaagtagcaatacattgtaatttcagttctagtgctgaacgttctgagtataagatgtttgagactgggctttaaacacaactttttggtagtttgaattaagttgtctattgcttattttgggtctgagcttctgttctgctctctctcctacccacttgactcctcatttaattcagtagttcttacacaaagtaactaactcagctcagggctgctatggtctttctcctctgtaccagactgaatgtctgtaaaaggccacataataaattgtacttgagggatttctcaatgagttctccatgaggcctctgactcttctcaggtttctgacagatgcaagattgctgaagtcgccctgatttgcacacaggagcactggattgaaattaaatagactattttctatttaatttccactgttattggccacatcttcctgcaatctgtgaagctatttttgtataatgttaatactacaaacaaagctgaaacaattcagtaacacaattctgaagggaagaggtggaagaaggaagtgatagtaggtagctgtttaaactaatgcagacatagacatagtatgtactatatattgtatgtatagtatttttctatactcaaccaaattaagatgacacttacgcttaggtgtgatttgcgaataacttgtgttgttgtaatggattatgatgtatctgccaaattaattctgaaaacacattgctgccatgatctgtcgtaagttttgttccagttacttgagagttaaaaacaccagcaagagcaaaagaggggtttgtgactaggcagatgacttcacttaccactgataacccaatcaacacttaagtgactacagtgggtctccaatgattgcataggcaagaactgtggttttctacactacaagattcagagccttcctttcatgagatacattgtacaaaaattggggatcaatgtttcactgtttgcttcttttaaaaagtgcaacctaagtccagcatgttgtgggggcggggaaggggaagttgagaaagattctggttgagcattattattattttttttttaggcagtatcttgctctctcacccaggctggagtgcagtggtgcaatcatggctcactgcagcctcaaacctcccagcctcaagctgtcctcccacctcaccctcctgagtagctggtactacaggcacacatcaccacacctagctaatttttgtatttttttgtagagatgggttttcaccatgttgcccaggctgagctcaagcagtcctccctcctcagcttcccaaagtgctgggattacaggtgtgagtcaccacacctggcctgatactgtgagcttttgggtactactctctgctcttatctgaatagtgaagttactaagttagttacctggaaactggagttttggggtggtcagtgcaactaaactcttatccatctacgatgaccaatctgagatgaaatttaagttctgaagtagttaaacgcagttgtgtaaaaggtgattgaataagtcggtatttagcatagctcagctgtaacatcctatcagtgctttcgtttgaaccatagaaaggtatacgcagccttatcttgagatactgtcttcagtagacaaaaagtcaagctgctccctcatatgctggtgttttggttgagcttttcaaaaggatctttaaggtcaacagctaaagtgttattttagtatggttttaactttaattacacatgctgttagccagaatgacttgtttgggagagtttaagcttgtaataccgagtttgttttagaatttagtgttatttggggtgttaactcctttttctctagggaaccaatgacttactattgccatctaccctcttactacacaagctttttaacagccccttctatttaaaaggctgggcatggtggctcacacctgtaatcccaggactttgggaagccaaggcgggtggatcacatgaggtcacgagtttgagactagcctagccagcatagtgaaaccttgtctctactaaaaatacaaaaattagcctggtgtggtagtgcatgcctgtaatcccagctacttgggaggctgaggcaggagaatcccaaataggggaatcccaagcaggggaatcgcttgaacccgggaggcagaggttgcaataagccgagatcacgccactgcgttccagcctgggcgaaagagcgagactctgtctcaaaaaaaacaaaacctagtatacaaacagatctaatgcttaccatgtcttcatggtaaccaaaagagaaacaaaggctactcaacgtctgatttgatagggtcaggtaagtcctacagggcaggcagtttaatatgggatatggaacaaaggtttgtgaacataccaagggctaggtgcttttcatgtgttactgttatcatcggctcattatggcctttgagagggccagtggttttccatttcacaaagaagctgaaacccctagtactatgtcaaggccaccctgctagctggtggcagaggaacttgaaagcagcactgtcagatcctggagcctttcctcattgactgttgcaactttgctgcccctgaatcataaatgttcaccccttctgtgtctttaagtagtttgtcatgattctctcaagatgtagaaacctctagctatttatgctggatgtggtggtatacacctgtagttacagctacttgggaggctgaggcaggaggatcaagatttccaggctgtagtgtgcaatgattacaactatgaatagccacagctctccagcctgggcaacatagtaagatctgcctgccccccacccaacccaatctctcttatttatttatttatttatttattttgagatggagttccactatgtcacccaggctgaagtacagtggtgagatctgggctcactgcaacctccacctcctgggttaaagtgattctcccatctcagcctcccaagtagctgggactacaggaatgcaccaccacacccagctaatttttgtatgttttagtagaggtggggtttccccgtgtggtcaggctggtctcgaacttcctacctcaagtgatccgcccggctcagcctcccaaagtgctaggattacaggtgtgagccaccacgcccagtgagaccccatctctaaaacaaacaaacaaaaaacaacaacacaaaaaaacctgtggccattggatagtgtgctcatttataaatagatgcataaagttgattttgctgctgaattttttcctcccaagaaacagcatagaatacatgggctttttttttttttttttttttttgagacagagtcttgctctgtcacccaggctagagtgcagtgacatgatctcagctcactgcaacctctgcttcccgggttcaagcaattctcatgcctcaccctcctgagtagctgggattatagtcatgtaccaccatgcctggctaatttttgtatttttggtagagatggggtttcatcatgtcggccaggctggtctcgaactcctgagctcaaatgatctgccttcctcagcctcccaaattgctggtattacaggcatgagccaccatgcccagccttacatgggcttttcatagaatacatccaagcttcatcaaaagattttgtgtatacttagaaacatcccatctcttactgtgaggtgctgaagtgaaaggcttttccataataatatagtgatgtgccccagtgattgctaataggataatttgtaaaacatgctttattacatacactgcccataccttaaagtctgggattgttgagaaatgaaatagaaactttagtagtgaagccgacctgtgagctgatactttgtcaccttactgctctattttatttttctctcttgagatgcagtgtggtgctgataaaatggcagaagctttggagttgaatagatgtgggtttgaattctgacttccattgcctgcctcagtagccttggggttttctcctgtaccttgagaggtgtgtggaaatgatatatctatagaggtggctgatgtggttcctggcacatagtgctaaacaagttgtaatggtttcaattaattgagcacctaatactagcaaagtatcgtgatgaatgaaacaccgcttagctgctgacagcttaccagagaatctgggtgacaagtaaaaatgcttatacttttagtgcccttccaagttctgtggaagagaagatatgagaaggatggatttggatggcggcaatgggagggcttcatgaaagttgtgaatttgaaatgaccttgaggaaggtcagaggaaaacctgaaaggcgtgctagtatatttgtactgtggaatcttctatttatataggcaataaaggacaattggagctgtcctgaggagagtcacctgatgcaaccccttactgatgtaccttcttgttctttgagatggtttaaaaaaagaaacaccccaaacttttcattagagacatgggtgagtggcccagtgaagtgagtgacaggggaggcaggtgtggcaagacagcgatgtgagcatttggtgccctgtctgctggctgcttagcggcctcttcactgtgcttctgggtttggctgtcttttggatgaacagctttgccagagggttttgccgaggataggtgaattcaatgagaacaggtaagaaaatgagttgtacttagagcaggacaaggatattgacaactgaattctctagggggtagggtttctctcacctcatttttcttcattctctccattaattgtggcaatgtttacctttcagatttcactgatttacggtcctgcaatgtccagcatcccagttttattgaagaatgacttagactgtgtttccaattcattggcaattgcctgaggaactttcatttagactttttgtgggattttactaagctctaattggaccttcctttaattttataatcgtgtattgtgtatgacttcttcttgccaaggtgcctaagaggagctgacagctgtttatttagtatatgcagtggttttcaaagagcagtctctggagcagcagcagcagtaacagcagcggagcatctcctgagagcttgttggaaaggcagatgcccaggccccactcagacctgccaaatcagaaagcctgtgacggggtctgcagtctgagttttaataggccctccaggtgattctgatgcgctagagcatcagaaaggtaaagaggcatttctgatatatagttactcttcacagtgcttgcaggtttttgtcaagtaagtgaaaacacatgggtatgttatggaacgctttatttacagtatctcttggatgtttgatttgtaaaccacatgctaaccaggccttgattactttacaggttcatgtttattttatagaattaattctgctatgactttaagtttgcttttctttcttctgggaaacaaatgtgatttggaaggtgctgtagtttgaatgtattccccaaagttcgtgtgttggaacgtagtcccccatgcagtagtgttgggaggtggagcctaatgagtggtgattaggccaccagagttctgccctcctgaatgggttaatgttattgtgagagtgagtttggtaaaaggatgagttcagcctccttttctctctctttcacccatgcgatgccttttgccatgttacggtgcagtaagaaggccctcaccagttgcaggcccctcaaccttggacatcctagcctccagaactgtgcggaaacaaatttctgttcatcataaatgacccagtctcaggtattctgttatagcagcacaaaacagactaaaacaaatggaaaagtttaaaatctccactgactagagataaagcaaggttagcttcccagggatttcagctggaagtgaggcttataggagccattgggaaggctgagtgaacggggaacctttttgtgtaagaaagggaactctaagcctggaaattctgagcttctaatccctgggggtggcacatggggggctggacagtaagaattgatagatgtcctccttctccattttttttctctccaggacaccttacagtgttattcatttattcgtttattcattcacaatttttagaactgttgaatatgttagcagagatattatttgatagacataagtgcacccaggtcattcccaaattgcagggaaactaccaatctgtttaatttacttttgataaaagataggaggacatttttattgtttattgcttgggatctcccaaaaagaagatttctaattggttgttctttctctattactactaaatctctgaaggaagacattttaatttttttaaaaattagggtggtttatttcttgataatttttattaagagataggatctcactatgttgctcaagctggacttgaactcttgggcccaagagatcctcccgccttagcctcctgtgtagctgggactacaggtgtgtaccaccatgcctgacatagttcctgataattttgtctcagttctcatattttactggcaatatgaattcaatcttaagtaatgttaatgcatatcctatagttgtctccaaataagtagacttgatttgcatataattgaagcaacatatatttcacatacttatgcctagattcagtatctagccagcagcttggtatcctggcacttagaagatactcagtaaatatttgctgttatgacaggtttgcataacatgtctatactgtattgtttgtctaaatgaggaatttattgtctgtctaattaaagatcatcttggcagctttcagatgccatgcaaacattaaatgttgagtttagatttgcttccatcccctgtggaacctggcaagttgttttaatttctctgtgcctcagtttcctcatctgtaaaatgtaagtggaaaatgcatcatcaaaggattaaatgatttaatagatggaaacgtacatgctcaaagtgtgctcccatggagtcaacacctaaagggcagggatggtgatggcagaacccccctcattactgctgccccttggtctgtatccttctttacctgtatccttctttacctgtatccttgtctacctccttgcctgttctttttcactttaacagaatgtggatttaaaatcctagccctattttcttttttcttttcttttctcttttttttttttttttttttttttttttttgcgatggagtctcactgtgtcgcctaggctggagtgcagtggcgcgatcttggctcactgcaacctccacctcccaggttcaagcaattctcctgtctcagcctcccgagtagctgagactacaagcacatgccaccacaccaggctattttttgtatttttagtagagatggggtttcaccgtattagtcaggctgctcttgaactcctgacctcaggtgatccatccgtctcggcctctgaaagtgctgggataacaggcgtgggccaccacgcccaactctagccctattttctcttcagaatgggaaaattcttaagttatctatatggaaatacttcagtctatcaatttgggtggggaccaaattaatccttgtgtctgtatacttaaaaaactagtatgttctattgtttccagatatagccgaggtggggagaacatttggacttctgtgttgtatattttgccatcttgcaggggatcttggaagtgtcattctgaagttaccaagcattctcttatttcatttaggcttccaagttgaagttggtcgttgctgctgctgttgcttgtctaaaagcctgagggtttataatgctatctagatgggaaggagctacttgaaatgtgtttgaatctttatgcttgcttcagaatgtagagtttgacttagctaccagggtcagccaaccttgtggtcaacccagtcctgtgggagtttagaagggaggtgaggaagaggaagtacacttggtacactgggttcacctaacgtccctcaggcctcaccgcctctacaaagttaatgaaattttgtgttcataagctcagtgaagctcagctgagaggactaactggaatgttgaagccattaggaatcgaaaacctgggccgcaactcacgtgcccactttttaaaaaaattctagtacttttcatagaagatgtttgctagtaacccctctattattcctcacctccccaaaaggggaccattgtaatcagccagtcttggtccttgagattgtcacttttctgttttttgccccagtcctacacgaagcaggcttctcagggtgggatgaggagcctggtaagatagtcacatagtcagcctcatgaaatatgactccccattcacctgccccctaaactgtgcttcctcaggtaagatctagtaaggcagcccaccagagcctcgctgcatgttgaactcttaggaagtttgtccaagaaatggtagttatagagctaatacaaacatgcttttgctctcattctgttctctactaatgagttttattttccaaaaagaaacaaagatacatttatttgtaaagaatatataaggccggatatggtggctcaagcctgtaatcccagcactttgggaggctaaggcaggaggattgcttaaggccaggagttcaagaccatctgggcaacgtagcaagaccttgtttctacaaaaacaaaataaaaaatgaatatataaagataattttttcctccatgagaaccagggtcacgtgaggcccttccctgctttggcactgattctggtgatagtctcaaaagcttccttcctcagttctccagtctaatctttgctattagtttgaattggttaacaggttggaggattgtgcttgcttattcctcttcactggactctgcctgtaacttttcacattagattaggggaactctgagaaagaagtggagcttataatgtgcttctgtattgtagctttgatatctctgaaaacgtgtacctttctctgctaagcaggacaaataagacaaaccaaacagggagggacatcctcatcctgtggacatgtgaatatttctagaaggttatgcaaataatctagaaggttataatatctttttagaagttgcctttgggaagagggactgggggcaggagtgggaatgcgatttgaaatagttttcaccatatgccgtattaccctttgaaaaaataaagcaaatgtgtgttttggaaaaatatgttttgagaataatgtggacaaaatagaacagcagtaaaatccatgaggaatcaggactgtatcttttggtcaatgctgtatccccactgtctggtacataggtcaacatggcagcagtgattctgtgtaggtaatgagatattttgtgattaatattttttcttcctcaaattttcagctatacatgtttttatagttagactgtaacagttgagttggaaaaattgtaagttaccctttgctgctcaagatacaaagttctctttggctacaaactttgccttatgaaaattagtctgaaagatagatcagttattattggaaggattcagtggctatctaattttccaagtgtgtatgtgtgtacatgcatagagaatgagggacagaaatgttaagaggcccaggactctatagctgttaaactgttgtagttaataatttgtgaaaggggccaggcacagtggttcccacctgtaatcccaccactttgggaggctgaggcaggcagatcactggaggccaggagttcaagaccaacctggccaatgtagtgaaaccctgtctctattaaaaatacaaaaaatattagctgggtatggtggcatgtgcctgtaatcccagctactccggaggcttaggcaagagaatcccttgaacccaggaggtggaggttgcagtgagccgagatcatgccactgcactccagcctgggcaacagagggtaactgtctcaaaaaaaaaaaaaaaatgtgaaaagaaagtgtgtaggaagcagatctgtaaaaggtagtaatgaatcaactagtgtccatgggggaaataaaggttgtgacacgaaagtggagtgttctcttgactcacaaagtgaactctgaagagcctgtgaagaggtgaactactcatgaccattccttcattcaacaggaggtgctagatgccatgtataaggtggaatttacatagggtttatgaccaaatgccttcaggggtcaaatgtgatcacagcctgtataaaataataggaagctttggagtgtctctcagctggagaatgcatttgctgctttcgtcactcaaattggaagggaaacatttgtgagcagtgtacaggcaaaacaagatagattagtcttgtttagcatcttggaagctgccactggccccagcattatgctgtaaaatggaggtagccatggaagtaccgtgaccttagaccaatgagagacgagaagcactgtgatagcaagacctgcatctagcatctgaggacttagactgaggtgccacttactgtgtgatattgggtataagttctttgagcttttttttttttgagacggagtctcactctgtcacccaggctggagtgtgcagtggcgcgatcttggctcactgcagtctccgcctcccgtgttcaagcgattcttctgcctcagcctcccaagtagctgggactacaggcgcatgccaccacgcgtggctaatttttgtattactagtagggacagggtttcatcatattggccaggctggtctcaaactcctgacctcgtgatccgcccacctcggcttcccaaagtcctgggattacaggtgtgagccaacacacccggcctgagctcttctttatttttggagacagggatcttactctatcacccaggctggagtgcagtgacatcatcacagctcactgcagcctccagctcctgggctcaagtgatcctcctacctcagccttctgagtagatgggaccataggcatgcaccgctatgcccagctaattaaaaaaaatttttttttgtagaaacagtcttgccatgttgcccaggctggtctgagcttctttctacatttgaaaagtgggtttatgtttaccctgtctcaaaagagggtgaggtatgggagattgctctgaaaattgttcaagtgtgtgtgtgtgtctacagtggggagggatttaccacttatttgaataattctttggtgaagtcttattagtgttgaaacgggtttatcatttaatcattacctcaaaggcaatgctaccttagctttgtgacatatgttttaaaataaataaattaattatttttgagatgaagtcttgctctgtcacccaggctggagtacagtggcgggatctctgcttactgcaatctccgcctcccgggttcaagtgattctcctgcctcagcctcctgagtagccgaggttacaggcgtctgctaccatgctgagttttatatttttagtggagacaaggtttcaccatgttggccaggcaggtctcgaactccttacctcaagtgatccacccaccttggcctcccaaagtgctgggattacaggtgtaagccaccgcgcctggcctatttatttattttttgagacagggtctggctgtgtcacaggctggagttcagtggtgcgatcttggctcactgcaacctccgcctcctgggcttgggccattctcccactttagtcttccaaatagctgggattacaggtgtatgccactatgcccagctaatttttgtatttttagtaggagatggggtttcgccatgttgcccaggctggtcttgaactcctgagctcaagtgatccgcctccctcagcctcctaaagtgctgggattacaggcatgaaccattgtgcctggctgatatgtgcttttttttgaaacggtgtttgaaatgagattttcctggctgggcgcggtggctcacacctgtaatcccagcactttgggaggccgaggcaggcagatcatgaggtcaggagttcaagaccagcctgaccaacatggtgaacccctgtctctactaaaaataaaaaaattagctgggcatggtggcgggcacctgtaatcccagctactcaggaggctgaggcaggagaatcacttgaacgtgggaggcggaggttgcagtgagctgagattgcgccattgcatcccagcctgggtgacagagagagactccgtctcaaaaaaaaaaaaaaaaaaaagattttcctttctccttcaacttgaaaggcaacattttgcattttggtagcactatctttgagacgtaacttttttgaatcctaatatatgatttttagccagattcttccttgtccatcttagcatttcttttactacgaagtgtgaattttgaaaacagaagttaatagtaagaatctctgaattgaggctggacccggtggctcacgcttataatcccagtactttgggaggcagagacgggaggattgcttgagccatggagtttgaggccagcctgggcaatgtcaggagactctgtttctacaaaaaatctttaaaaattagctgtactctagcctgggtcacagagtgagactccatctcgaaaaaaaaaaaaaaaatctctaaattgaaaagactttaagagtagtttctttgagacccatgctgtaggaaaatatttcatcaagggaaactactctgcgagggaggggacatctgtatttttaacactggaggataaagcttgggaaggcaattctgtctcctaatctgatgacagagatcctctctttataaagcttatggcttattctcaggaaaagtaggggggtgagtgtggaagatagtgtggctggggtcacttaatgcttgaaaaggtttcctagggctgctgggtgtcaacagcgggccagcctcctaggttgattacacgtccttgactattatccacgcccttgactattatccacaccagcataatatcccatcttggattagagatcatctaattcatagttgtcaacctggctacccactgaaaactccaggaaagctttaccaagaaaatgtgtgttccctggatattgtcactatcctctgtttatttggggatagaatattctggcataggtgtttttattttaaactttatttatttatttatttgacggggtctggctctgttttctaggctggagtacattggcatgatattggctcacttcagcctcaaactcctgggctcaagctatgctcccaagtagctaggactacaggcatgcacaccacacctggctaattaaaaaaatattttttggttgagacagggtctcactagggttttttgttttgttttgttttgttttatgtagtctcactctgttgcccaggctggagtacagtggcatggtctcagctcactgcaacctccgcctcccaagttcaagcaattctcctgcctcagcctcccaagtagctggaattgcagacacatgccaccacacctggctaattttttgtatttttagtagatacagggtttcaccacgttggccaggctggtctcgaactcctgatctcaagtgatccccccacctcggcctcctaaagtgctgagattacaggtgtgagctaccatgcctgtcctcactagggtattctttttctttttcttttcttttctttttttttttttgtgttttaaacactttcaagctctcaaaacctcaaagaaggatacaatgaacatctattcccttcacttagctttaccacctgttgacatcttgccacaccattccatctacagacattgggatggctcacccctaaatccttcagcacacatctcacatactgagaaagacattcttctctccagcttcatcctcagtgttaccattactgtgtgttcagttccattgttcaatataaattccacactatgatttcccctgctatgctttatagccatgttttaggacccaggtaagtttctcgcattgcctttggctgttattcctcaaggccttccccagcctggaagagtggtctcacctccctctcaatgcaatgaccctgaatcctctgaggagtccaggcctgtttcctccaggtgcatcacatcaggggctacagtgtccaccctcccactactggtgatgaatagatatttttaaaaacctccctaggagattccaatgtgcagccaaggtttgaattcattgaattaattaaatccaccctactttatttgtatgtgtttttttttgtgctaaaatacacataaaattatcattcttaccatttttcagtggacagttttgtggtattaagtacattcacattgttgtataaccatcatcacgatctatctttggaactttttttttttttttttttgagacagagtctcacactgtcacccaggctggagtgcactggcatgatctcggctcactgcaatctccgcctcccgggttcaagtgattctcctgcctcagcctcccaagtagctgggattacaggtgcctgccaccacgcccggctaattttttggatttttagtatagatggggtttcactatgttggccaggctggtctcgaactcttgaccttgtgatccgcccaccttggcctcccaaagggctgggattacaggcgtgagccaccgtgcccagcctctggaacttttttatcttcccaaactgaaactccatacacattaaataataactcccattctctctcctcccagcactggataaccaccattctactttccatttctatgaatttgactgctccaagtacctcatgtaaggggaattatacagtatttggtcttttatgtctggcttgtttcacttagcatgtcttcagggttcaaccatgtcatagcatgtatccgtacttcctttttaaggctgaataatatcccattgtaggtacaggccacattttatttatccattcattcattgattgatacttgggttatttccaccttttggctattgtgagtgctgctacagcgagcatgggtgtacaaatatctgtttgagcctttgctttagttttgggtatatacccagaagtgggattgccagatcatatggtaattctgtttaattttttgaggaattgtatacctatcactttttaatggagtgaattgaagaacacttcaaagaatgaagtatccatgacttgaaggaagaagccaattagaatgccagcctttaggctcctgtttggattacctcctgggaggtcatgtgtaaattcatcttttcttcacacgagataaagagcaatgggtataaagtctagctgtggcagctgggtgcagtggctcatgcctgtaatccccgcactttgggaagctgaggcaggaggatcgcttgaggccaggagttggagatcagcctgggcaacatggcaaaaccctatcctctgcaaaaaaaatacaaaaattagctggtcgtggtggtgtgtgtctgtagtcccagctacttgggaagctgagatgggaggatcacttgagccccggaagttaaggctgcagtgagccatgatagtgtcactgcactccagcctgggtgacagagtgagaccctgtctcataaaaaaaataggtgtggcaaaatttacttctttgtgacttcaggtgtgacctcagatatgcaggacaagggtcacagtttttcatttacattaatcatgactttttagaatttttaaagtttttgattggtgacttaaatagtgcatagacaacaagttgcctttgacctctataaatagtgtaaaacaaagtaacaggctgcctcttggggcatatgggattttcaaaatagaatattgttttgttaacctggctcatccaaatactgtgcgatcttgaacaaggtcttaacttccctagctcatgttgtttagctataaaatggggataataatggtaatcagaatgaaataagctaatctatgtgcttggtgcctgacacatagaaagcattcattcagtgcaagctattaatataatatttcccattgattttaaaggtgtttagacaattccaatacaccagaaactgatatttttaaatgagttattactcttttacaggaggtggcatctatttgactgtcttgagatgagactggcctgggggctctagaatggtggtgcttaactggagcaaaaggtggcaggagcatgtgagagctctagcataactgtggccttaaagtaagcagacgctatgtatttcctaagggtgagtgttgataatttttatagattgctgaggccacagggtccagattaagcaagtgtgttccgaggagtctgacttcactgtgctttgactgaggtagatccaggactcagttggcggctgtttttgaaggctgatcattcttccactccttcattggaaattagccaagaattataaaaacaacagtttaactccatgcaaccaagtggttgtctcataatgattagtttggagcttgtgctaagtactctgtgtggagttcccaggattatttaacaagagaaaatgttggctctgcaggagagcctagtaaattttgaaacgcagacaatcctacttcagtggaaaaatcctgatcttaaccccgagtctctggtctgtctctggctcccttgtgcaatctggggggattgtgcttcatgtctggtagaagaggacaggtctatgagaaggaggcatgtacacacagctctaagaagtggggaccggcttctacactttctgccaggttaatctcaaatggtgcagataataacaaacacatatgatgcttctatatgccaggtgctgttttaagcactttgtaggaatcgcccaatttaatccttgtaactaaactctgaggttggtaatgttatccccattttataggtgggaaaactgaggtgcagaaacattaagtaacttgcccaaggtacagctagtaagtggcagaatgaaccaggcaatgctacgccaggctttgtgcctgtcatgcctgttgaatacaagctagaaagacagcttttgggtacttggtactctgtcttctgagtaaaggatttatccattttattagtttcctgtttgttcctgctataaaaaattaccactaatcaactcagtatagccattaaatttgggaaaaagaagaattttagacattctaaattttttggcacagtgactgtctaatcatgaacagcgatgtgcattgccagggaagaagctgtgagttactggggttggctggtacctgctattaaaatggtgctggtacccgctattaaaatggtgcttggtcgaccgggcttggtggctcatgcctgtaatcccagcactttggcaggcctaggcgggtggatcacgagatcaggagttcaagaccagcctggccaaggtggtgaaaccccgtttctactaaaaatacaaaaattagtcaggcacagtggcgggagcctgtaatcccagctacttgggaggctgaggcaggagaatcgcttgaacctaggaggcggagtttgcagtgagctgagatcgtgccactgcactctagcctgggcgatagagcaagacttcatctcaaaaaaggagaaatagtgcttggtcatcatcaaagctgagaagtcatcacaaaaacagatgaaagaagaaagagtgggaagagtgcagaagtagcagatatgcaagaaaggatttagaagcatcaaaaggcacatgaagccatggtgggcactgagctagtgagagagggcacagtaagagtatcactgtttagaagaaagtaactcatgatgataatttacactgtctctcagtgacttaaagtgtattcagcacattctgaatagggaaactgggaagcgtggaatcctttatagagcagttttctaccacgtttacattgtagcacctgtaggtttagcgaacagttaaatggaaaataggctcatttagaagctctttaatcaggcaggatggcagggatatatattgttcttaaaataatttctatagcaacaggactttctgaaatatatccataactcagttaggaatatccactttctattttttgccttgggtaatcaaaaacagagacccaaatttgggactgaactgtagaattcgtgaggggcttcaatattgttttcagtgtgtttattcccccctgctttcattgtccttgtctacttttattttccctttacccaattttaagatttcttttatttataaacctttttttccctaacagatcttttttatttttattttattttattttttgagacgaagttttgctcattgcccaggctggagtgcaatggcacgatcttggctcactacaacctccgcctccctggttcaagtgattctcctgcctcagcctcctaagtagctgggattacaggcatgtgccaccatgcccggctcattttgtatttttagtagaggtggggtttcaccatgttggtcaggctggtctcgaactcctaatccacctgcctagtcctcccaaagtgctggtattacaggcatgagccaccacgcccggccctaacagatctatttttgtaaacctcctcaaatatttttaggaaaaacatgagatataattaaagtgttcattggacaagtgagtggttggactcctctctgccctcagggagctgattttctgggaggcgacatggcccactggcccagagctgggctctggctctgtcatttgctaatgcttagctctggtttcctctcctgtgacctgaagtaatgaaattgtagtacctgcctgatggcattattaggacaaaatggaacaacaaatataaagcactctcacagagagagtgcccagtgagagaaggaggaagcattctgtgaagaggagacaggctgtgcccaggcctggccttaatgcatgcatgcacgcaggattgattagggaaaggagagcacggtgcatggagggtctggactgccatgggaggcaagtattctggagacactgaggaggcattcacagtcagacctttcctgcttctgcctcctcagctttctttatcttcctgcaggactctaagcctctgcctttcttgctttctttccctgcattcgcttaatccatctggagactatgctagctcagttaagttggggggctgccctctctagtggttccagcaggactgaggatcggttcaacactcataacactggtgaccactattctgggagacagattcttcattaaaattttattgcttggtttccttttttcttctccatcctctttatttactaccctctgttatacataaacttttgaagtctgaatagcaaacagctgttaatgttgccattgcagaaccacggacacaacttaaaataaactgattggtttataatgacatggagaaatgcttattcaggaagcaaaaaggcaagatacactgtagggaagttagaacctaaatagtacggggaaaggactgaaaggaaatgtgtcaaattgttaacagttgttttagatagaatgatgtttcctgttctgtagtcttcatttttcccagagagacttgtaagtattataagcaaaagaaaaaaaaacccacattagttctcatattattccttctgattatgagagatgaagttctcatctgctcggatttgactagtgtgggctaataggtcccaggtagacattgttgatgggatgaattgccaataatcattttgctggccttgcttttcggttaccttttacctgagcctctgagctccataacaccactgtgcctcatgggtcagtgcgtgcataccacacagaaatgtgagttgttcatgcatgctggggttagaaactggaggatagactcagtctgaagtggaaattcttgggtactaacttcatggatcagtttcagagcaggttttcccatggtctgtgccagtatcctcagtcttgatgctctcaagtcaacgggattagaatgtgtttgcgcagttctgggtttcccttcatcggcatccagtcattttcagtgagcagaattgcggtcagctggcacatcaccagcaagggccaaattagacataattgcacatcagtttcacgttaaggtctgtggcttaatgtgctctgcaaaagcatgccaggcctggagctttgttctccctgggaacagcgtgccccagaagaaaggttacagtataaatcatcatccaaacctagacacctaggaaagggggattctgttagtttttccaaggcaaccatataaattgtgccagccctgggcaagccaggacttatggtcaccctgcccataaggatgggtctgtgcaatgacattcactttcctagacagcctttacagcaacctttggagcagaagggaaaccaaacagttggagaggatgccacagcattccagaaaaggggaagccgggttccttttcaggaaagttgagctaaaaatagaacatcaccattcaacagttgctcgagctcttcaaacactggggcttgtgccattgttccttttctttgcatttcttatgagtcctggctccttttgctttgtgttgtaaaggaactggtctatgtgccgagtctgctgggaagcagcccctttaatacacgaagggcgctggacgagaggatcactaaggccccttccagctctcacagcccatgattttataataggtaacctaaggcctgtgctgcatgggtaatgaggaaggacaagtaggggcccttcttgatgaaaggacagggcccctgcccctccatccttggctgtcacacactcaatggcaggctcttctctgagccaagcggggaaaaaccatggagggtgtgtgtgtgtgtgtgtgtgtgtgtgtgtgagtgtgtgcaggactttactgaaaaatgagttgcatagtggagtgatcagtacataatgggtggtgggcactgagagagaagagaaaataacattagagttaatcctgtaggtcagggtttctcagcctcagcactgctgatgtttaggactggacaattcttggttgtggggtgctgacttgtgcattgtaggatgtttagtatcatccctgacacactcaattccagttgcagtccccttcacctgtgacaacacaaaatgtttccagacattgccacatgtccccggttaagaatcactgttataaataaagaaacaaaattgttttctggacatttctttttgtgaagctgtgtgttgcctggccaagctcccaccttaagcttttataataccatttactggaccaattagtgttgtgacggtgggtggtgatttaaaatgaaataccctcactttcatgctcttggatttggctttgaaataaagtgagctgagctctcccccctcccctttcaagagtgcatgaataatgaggtctttctgccgggaataggattatgcttgttcccacaacttaaaactattttttcaaaatttctactgtgactagcatcctaggttttatcctgacagaaacgttccattttaaatgagggttccctagaacagtgcttcccacacttgaatgcgcgtgtgtcatgtgaggatttggtgaaattgcagattctgttcccgcaggtctgggctgggccccgagactgcatgtgtaacaagctcccaggtgatgccggcactgcaggtctccaggccacatttagtagtgaggctctgctacggaccagttcttgacataaaagaaaagttggcacatatgtccaggaggatgatgaaaggctctgagcgggggcagcataagctttcagcaatctgttgtgtgcggggctgctcgcagacccttctctgtgctggaggtgagtccctgagcccgtctgcagccttgcaggctgtcaagcagtgggaggaccaatgcctgcagttccttacctggcactgaggggagcattttaacaggacagcctgagacagatggctgcaccctctgaatgggcactgaaggggcaaactggccccagagaggcagcagcttggactgttagactctgagctatttggtggctccctgggtgtggtttgagcagagactcacagaggagcgccagcccctcagaagggctttggcctgcctttctgcttgcccagctctgcggggtgatgggcagccagacaccttctttcctagctcagtgctgcccttgttaccctgaagcctttgttgctatgggtctgctgggtacctgggaagggagaaggagtagggtatggtattgggcaccacgtgaagtgagtaaaatgtttaaatctggtaatgcaaaggaagatggggagcccaggaacccactgttctgcgccaggagtttgctttgaatccttttttctttttttttttttttttgagatggagttctgctcttgttgcccaggctggagtgcaatggcgcaatctctgcaacctccacctcacgaattcaagtgattctgctacctcagcttcccaagtagctgggattacaggtgtgcgccaccacacccagctaattttgcattttttttagtagagacggggtttcaccatgttggtcaggttggtctcaaactcctgacctcaagtgatccacccgtctcagcctcccaaagtgctgggattacaggactgagtcaccgtgactaccctgaatcttaatctgtaagtgggcagcgtctttccattgcttactaaaccaacttacttaaaaaaaaaaaaggtttctcagccaggtgtggtggctcatgtctgtaatcccagcactgtgggagaccaaggcaggcagatcacctgaggtcaggagttcgagaccaggctggccaacatggtgaaaccccacctctgctaaaaatacataaattagccaggcgtgatgacacagctactcgggaggctgaggcaggagaattgcttgaacctgggagacagaggtttcagtgagccaagattgtgccattgtactagagcccgagtgacagcgagactctgtctcaaaaaaaaaaaaaaattctagaagtacattgctttcctagaaaaacatctgaaatgaaaagtgattccttccattgagaagtaggtcatgtatgttttctcttatagatactttttgaccttattacccaaatataatcattttgtatacttaaggcatttttctttttagtttttattcctgtttttctctttttaaaaatatatccatgttaggctgggcgtggtggctcacacctgtaatcccagcactttgggaggctgaggtgggcagatcacgaggtccggagatcgagactatcctggctaacacggtgaaaccccatctctactaaaaatacaaaaaattagccaggcgtggtggtgggtgcctgtagtcccagctacttggggggctgaggcaggagaatggtgtgaacccgggaggcggagcttgcagtgagccaagatcgcaccattgcactccagcctgggcgacagagcgagactctgtctcaaaaaaaaatttatatatatatatatgtatatttatatatatacatatataaatttatatatatacatatatgtatatatatatgttaaaattagttaacattcccatcaccttgatgaagggtgttaaagtaaacttgtgctattcataattctttgaaattagaagaacatcaatctatgaaagtctttgtgggagaactgaagtccagagatcctgcccaaaccttcaatcccaagttcactaaggatttgcatttgtattccagctgaatgaaaaggagacacagacacacacacacacacacacacacacacacacacgactatttcatttgtataggatttaggacattttttagttttctcacagcatccatctaggtagagagagtagatatctgtagcctgtgggtggggacaggagttccagtgatttaaagactgatttgaggtcctagtgcagccctcagattccttggacttgtctttatagctggaagtaataggatttgaggtgtgaaaaatgttacctgcctgaattagccaggcagacctatatatgtggttcagttacatagcgctctgtgacaaatcacctcaaaacttagtggaataaaaccaccaccatcttatttgcacagattctttgggtcaggaatccagacagggcacagtgggaatggctgtctctgctccatttactggaccaattaacgagctccagctgggaagactgaaactgctgggggctggaatcatctggaagcttctccacctatatgcctggtacctggggtgggatgactcgaaggctggactcagctggggctgtttaccagagcatctgcgagttgacccttcatggagctcaggcttcttgcagcatggcagctggcttcccaagtgggagggttccaagagtgagcatctccacagaacaaatgttccaagagaccacgtggaagctgcatggatttttataacttagctttggaagtcagataacagcatttctgccactctttcttggtagaagctattgcacgtctccccagattcaaggagaagggacccacctctcactggaaggactaaaaaaattcacagccacgtaaacagaaaaagcacataagccatttcatgctacaccatggtgctaattcaatgaaagattagcttgagtagaagtcaggaaagctatatcaagaatgagttaattgtaaatgggggaaaaagcatgaacagtgtatattgtgaagaattaatgaaaataattgcgttcagtagcaaaattcaagttaacctaaatgcctagcaattggggagtagttcaaataaattataaataaaatatttatattaggaatatgatgcagactttaaaaagaatgaggtagctctatatgtaattatataagaatatgtccaagatctgttaagtgaaaagattgtttacagaaaaacatgtatgcaatgattcatgagtattttatcttaacgtgtacatatatatgtaaaaattcaggaaatagtcttaaaaattgcattaaattgttagtggatttctactgtagatgagagtaggacttgggtgggtaataggaaggagaacccacttctcactctatagttctatgctgtttaaatttttagatgtattacgttttcctatattgctcttatgatatgaattgctatgtgagattttaacttttaaaatacattaaatttaatttataaatataaaaatataaaatgtttcatatttttataaaatgtaaagtttaatttagttaatttggtaaacatttttcttcctgggactgttactgaactttactttcctagtattttattatatgaattggtacagtaggtgtggcatgggcacagatgggcactagtctgtttggcatgctttgtttggcatgctttgtagttgcgagagaaatttaagaatgccagtcttggccgggcacggtggctcatgcctgtaatcccaacattttgggaggccaagccgggcggatcatgaggtcaagagattgagaccatcctggccaacatggtgaaaccccagctctactaaaaatataaaaattagccaagcgtggtagcgcttgcctgtagtcccagctactcaggaagctgaagcagaaaaattgcttgaacctgggaggcggagattgcagtgagccgagatcgcaccactgcactccagcctggcgacagagactctgtatcaaaaaaaaaaaaaaaaaaggaatgccagtcttactgttttttgttcctcttactgctcaggcagtctcctcagtggcagcagttcctggaatgtgtggtgattccaaatgatctttttataatggttttaatagaaattaagggtagacatactcatgttgggttgagccacttatgcttgtattatctcccaaatggaattaactatattcataatatagttaattatagataataatcaaattaaggaaatttggtgtcattagaaaagatttatgactttaatggaattgactgatctttctttcttctttttttttttttttgagatggagtcttgctctgtcacccaggctggagttcagtggctggatctcagctcactgcatcctctccctccaggattaaaaaatttttgtgcctcagcctcccaaatagctgggattacaggcatgcaccaccacgccaggctaatttttgtgctttgaatagagatggggttttaccctgttggccaggctggtctcgaactcctgacctcaggtgatccacccacctcagcttcgcaaagttctgggattataggcatgagccaccatgctcagcccaggctggtctatttctgagctaatcttctggggtgggttttttggagcatcacatacccctcaagctaatagaacaggatagaagccaagatggagatctagagctacattttaaaggtgccagtcctctacttacttcctgtgttgtatggtaacctgatcatgcctcatttttcaaacaattatgttatttaaattagtgtcagacaagaagtagtaagaataacttaaacggtgccagggactgagctgtgctctggctgggcaatgagttagctgatacttcctacctgtataacatttatggtttagtaggatagacagaaacataaaataagtgattatgagaagatcggctcatcacaactttgagagatacacctggctgcatactctctgtttgccctttctgatccaccatgctctgtgccctgggaggcagaccattatggatcacatatggggccccttgccctgtggcttttaggtatttatttcccctgctccctccttccctcagcttcctcacatttgtaaaatgggatattatttaagtagtcagggtccaggcaggaaagaaatggtactcaaaacagtctaattgcaaagagtttaatgacagaaatttcacaaagatgtgaacaaggtaagggaaactagcaagaattgtggggtacctgggaggtaccccaaatacttgcagatacttttctctcacgtttactctgatggttatttcttttgctgtgcagatgctttttagtttagttgggttccatttatttgtttttggcacatttgcttttagggtcttagtcataaattctttgcctaggccaatgtccagaagagtttttcctgggttttattctagaacttttatggttttaggtcttagatttaagtctttgatccaaggcttaaggctctgggtcattggtggtgctatgttcctctgctgaaagccacagctcccatagggtggccctctcttacagctgttgttgcagctaaattcttgctgaattctggcaactaatcctcctcctcaaaaacacttaaacaaacaaacaaaaatgcatataaactctcccaccccttcagacgtaggggaggtgatagctttgctgttgctagcctcctaagtacccaacaattcttgctagtttcccttaccttattcatgtctttgtaaaatttctgtcattaaactctttgtaattagactttttataattagactttgttttgagtacaatttttttcctgcctgaaccctgactacttagataatatcccattttacaaatgtcaggaagttgaggcgtagagatcggtgaatatcagaactaggattcaaattcagattattttatgtcacggctgattcttaacttcagtgttttcctatttgtcacatccaaggaattctcatagtcatctttacattgagaagaaaccctagggaaaagtttcttacctgtcagatacagctatgaagttatgaggctataaaacaaactagctcttaaatatttcaataaataacatccttccaatcaactcctgtggttcagagtttttcgttactttcttttagaattgccatcagattcatattataagccaggaaggaaaaaataatctaaaagtaatcaaaccttcaatttgccaccgtattctctaggcttggttcaggttgactactggttgtttgcaaacacctgatccacttttgaggaccaagtttaaggatatatttaaaatttttaaagaaatttcaatagctttgggggtacaagggtttttggtatgtggatgaattgtatagtggtgaattctgagatttttagtgtgcttgtcacctgagtagtgtacattgtgcccgatacatagttttatatccctatttcccctcccaccctcctctttctgagtctccaaagtccattatgccactctgtatgcctttgcatacccatagcttagctcccagttataagtgagaatgtaacggtgtttgattttccattcctgagttacttcacttagaacaatgacctccagctccatccaagttgctgcaaaagacattatttcattctttttttatgattgactagtattccatagtatatatagtccatattttctttatccacttattggtcaatgggcacttagattggtcccatatctttgcaattgtgaattgtgaaaaagacacctgcattaaacatacacatgcaggtgtcttttttatataatgacttcttttcctttgggtagatacccagtagtgggattactggattgaatggtagatctacttttagttctttaagaaatcttcatagtgtttttcatagaggttgtactaatttacattctcaccagcagcgtataagcattcccttttcaccacatccgtaacaacatctattgttttttgatttttattagtagccattttggctggagtaaggtggtatctcattgtggttttaatttgcagttccctgattagtgatgttgagcattttttcatgtgtttgttggccatttttatattttcttttgagaaatgtctacgcatgtcatttgctcattttttgatgggattcttttttttttctttttttttgctgatttgagttccttgtagattctggttattagacctttgttgtatgcatagtttgcaaatattttctcccattctgtgggttatctgtttactctgctggttatttcttttgctgtgcagaagctttttagtttagttaggtcccatttatttgtttttgtcacatttgcttttagggtattagtcataaattctttgcctaggccaatgttcaaaagagtttttcctgggttttctcctataatttttatggtttcaggtcttagatttaagtctttgagccatcttgagttaatttttgtatacaatgagagggatccagtttcattcttctacatgtggctatccagtttccccagttccgattattaaatagggtatccttttccagtttatgtttttgtatgttttgtcaaagatcacttggttgaatttggctttgagttctttacttatgttccattggtctgtgtatctacttttataccagtaccatgctattttggtaactatagccttgcagtataatttgaagtcagttaatgtgatacctccagatttgttctttttgcttaggattgctttgactattcaggctgttttttggttccatatgaactttaggatttttttttctagtcatgtgaaaatgatgttggtattttgaaaagaattgcattgaatttgtagattgctttaggcagtatggtcattttcacaatgttgattcttccaatgcataagcacaggatatgtttacgtttgcttgtatcatctgtgatttctttcagcagtgttttgtagttttccttgtagtgatctttcacctccttagttaactatattcttgggtttgggtttttgtttgtttgtttgtttgttttttgttttggtttttttggcagctattgtaaaagggattgagctcttgatttgattcttagcttggtcattgttggtgtatagcagtgctattgatttgtgtacattgattttataacctgagactttactgaacgcatttttcaaatctagaagtcttttggaggagtcttaagttttctagataaatgatcatatcatcagcaaacaatgataatttgactttatcttttccaatttggatgccctttatttctttctcttgccttattgctatgtctagaacttccaatagtatgttgaatagaagtggtgaaagtgggcatccctgtcttgttccagtactcagggggaatgctttcaacttttccccattcaatataatgttggcttgtgggtttgtcatatatgacttttattattttgagatatatcccttctatgcctgatttgttgagggtttttatcataaaagaatgctaggttttatcagatgctttttctgcatctattgagatgatcatatatatatatatatatatatatatatatatatatatatattttttttttttttttttttttttttttttttgagacagagtcttgttctgttgccaggctggagtgcagtggcgcaatctcggctcactgcaacctctgcctcccaggttcaagtgattcttctgcctcagcctcctgagtagctaggactacaggtgtgtgccaccatgcccagctaatttggtatttttagtagagatggggtttcaccatgttggccaggatggtctcgatcttttggcctcgtgatccacctgcctcggcctcccaaagtgttgggattacaggcatgagccaccgtgcctggccaatcgtatggttttgtatttaattctgtttatgtgatgtattgacttatgtatgttaaacatacatttatatgtttatgttatacatacatacatacaaatgtatacatacatttatatgtatatgttaaacatacattatatgttatgcatacatttattggcttatgtatgttaaaccatccctgcattcctgggttgaagccccttgattatggtggtgtattatcttttttttttcttaagacagagccttgttctgccacccaggctggagtgcaatggcgcaatctcgactcactgcaacctctgccttttgggttcaagtgattcccatgtctcagcctcctgagtagctgagattacaggcacccaccaccatgcccagctaattttttatatttttagtagagatggggttttgccacattgcctaggttggtctcaaactcctgagctcaggcaatctgcccacctcagcctcccaaagtgctaggattataggcgtgagccaccatgcccagcctatctttttaaaaaatttttattttattttattttaagttctgggatatatgtgtgggatgtgcaggtttattacataggtaaaagtgtgccatggtggtttgctacacctatcaacccatcacctaggtattaagccccaaaggcattagctatttatcctgataaatagctcccccgctcccctcccacaggccccaccgtgtgttgttccccttcctgtgtccatgtggtttcattgttcagctcccacttacaagtgagaacgtgtggtgtttggttttttgttcctgtgttagtttgctgaggataatggcttccagctccatccatgtccctgcaaaggacatagtctcattcctttttatggctgcatagtattccatggtgtatatttaccacattttctttatccagtctatcatgggtgggcatttgggttgattccatgtctttgctattgtaaatagtgctgtaatgaacatacacatgcatacatctttataacagaatgatttatattcttttggatatatacccagtaatgggattgctgggtcaaatggtattatctttttgatgtgccgttggatttggtttgctagtattttgttgaagatttttgcatctatattcatcaggtatattggtctgtagttttttttttttttttttttttgtttgtttttttttttgtttttttattatgtccttttctggctttggtatcagggtgatactagctttcatagaatgagttagggaggattcctctttctaaatctttagaaatagtttcagtaggattggaatcaattcttctttgaatgtctggtcgagttcagctgtaatccatctggccctgggctcttttttctttggcaggtttaaaattattgattcaatctcagttcttgttattggtcttttcaggatttctgtctcttcctgattcaagctaggaaggttgtatgtttccaggaattcatccatttcctctagattttttagtttgtgtgcacagaggagttcatagtattctcaagtgatcctttgtatttctgtggtgttggttgttatgggcttcattttcatttttttctttttttgagatggagtgtcgctgtgttgtccaggctggagtgccatgtcatgatcttggctcactgcaacctccacctcccaggttcaagcaattctcctgcttcagcctcccgagcagctgggattataggcgtgcaccaccatacccggctaatttttgtatttttagcagagatggactttcaccatgttggccaggatggtctcaaactcctgacttcaggtgatctacccaccttggcctcccaaagtgctgtgattgcaggcaagagccaccgtgcctggccttcattttcatttctaattgagtttgtttgaatcttctctctcattttcttggttagtttagcaaatgatttatcaattttgcttatcttttcaatgaaataactttttgtttcactgacgttttgtattttttgtttaaatttcatttagttctgctctaatcttttatttatttattattttctagttttagctttgtgtttgttcgtgtttctgtagttccttgaggtgttatgttgtcaatttgtgatctttccgattttatcttagcactgcttttgctgtatcccagaggctttgataacttgtgtcattattatcattcatttcaaagaatttttaagtttccatcttgatttcattgttaacctaaaaatcattctggagcagattaatttccatgtatttgtatagttttgaaggttacttttggagttgatttctagttgtattccactgtggtctgagaagatacttaatacaattgtttctttaattttactgagacttgtggactatcatatggtctatcttggagaatgtttcatgtgttgagaagaatgtatattctgcagttcttgggtagaatgttttgtaaatatctgttaggttcatttgttctagagtgtggtttaagtccagtgttcctttgttgactttctgctttgatgatctgtctagtgctatcagtggagtactgaagtcccgtactattattgtgttgctgtctatctatttcttaggtccagtaataatagttttatgaagctgggagctccagagttaggtgcacatatgtttaggtggtaatatcttcttgttggattgatccttttgttattatatagtgaccttctttgtctttttttttcttttttactgttgttgttttaaagtatgttttttctgatataagaatagctactcttgctctcttttggtttccatttgcgtggaatacctttttcactcctttacattgagtttatttgagtccctgtatgttagataagtcttttgaagaaagcagatatttggcttgccttgttttaatccattttgccaatctatatcttttaagtggagcatttaggctatttatgttcaatgttaatattgaaatgtgaggtactgttccaatcattgtgctgattgttacctagatacttggttttctttgttatattagtgttttataggccatgtgagttttatgctttcaagagtttttattctgctgcatattgaatttttgtttcaagatttataactccttttagcatttcttgtggggttggtctggttgtgacaaactcactcagcatttgcttgtctggaaaagactttatttctccttcatttatgaagcttagtttagctggataccaaattcttggctgacagttattctgcttgaggctaaagataggaccccagtcccttctagcttgtaagatttctgctgaagttaaggggacatttaaaagaaatacattttctgctgggtgtgttggttcatgcctgtaatcctagcactttgggaggctgaggtgagaggattgcttgaggccaagagttcaagacttagctggccaacatagtgagatcctttctctttttaaaagcattttcattttttataattatatatttttaaaagtaaaattttaaaaatacattaattgagttgaaggacattccaaaagaggcacctaaagatgtgctcagtgatggctgccaagttgaaatgagcatagagcttctagggactattttgaaagataggatatttatttctgtgtgtgatctcttgacttacaaataccagaacttactcatgttacctgtgtctcacctcagtgcatcctgggtgtgtattaatttctttgacctgcagaagaactctaggctggccaagttgacagtgattgagagcatacagcccattattgccatctaaccagagatggcttgagacagcatagcctagtaagtagttaagagtagggccctggccgggtgcagtgactcagtaatcccagcactatgggaggctgaggcggacggatcatgaagtcaggagtttgagaccagcctgaccaacatggcgaaacctgtccctactaaaaatacaaaaattagccaggcgtggtggcggatgcctgtgatccctgctactcgggaggttgaggcaggagaattgcttgaacccaggaggtgaaggttgcagtgagccgagttcgtaccattgcacttcagcctgggcaacatgagcaagactcagtctcaaaaaaaaaaaaaaaggagtagggccctgaagccagactgcattgatgacaatctaggccctacaaattactgctcagtgtccttgtgctctgtgtcttggtttcctcatttcgtgagcggaaataatagtactttattcacacaggttttgtgaggagttaattagttaatttgtgtaaagggtttaagagaatgtctagcacaactgtaagtgttcagcagtggttagcatgctttttattgctgtcattatcttgacagtctgagatgcccgtttattcttcctgccactgtgtaatcacattcatctataagtcttgtctgtcacattttagtaaactcttttttacttcccggaaggaatcaggaattaactacctaaagtacctacttttgaagaggttgtgtctaagtcacgggatatgagaaaaagaaccaaaagaaaaagaaggaattacgagcctggaagaaagcgagcatgttggtaagagaaggtacaactgtaataatgctacttcttataaagccagtggcagggttcgtgaatctcagcggtatgtttgggctgattttcacttctggttctgttcccattcgagcactacctttgatctcctatgctgttaatacctgttacttttctaccttttggttaactttgtagactgaactgttgcagatgaagaatcactcttgcatcaggcatgtaaaagatatcaaaactaaagaaattttgccttccttaagaaagcaagaatgagaaatccccctgtgccatccataaagagggcattcaaagcctgagtgttgagtaggagttacagcagaatggcacatgtggaatgaagttcaggcctttgaggactaggaaaatggtactcagcttttctcgtattaatgcctggaagcaggaagagctgttctacctataaaatgggggttggagggatcctacccattagcgagggaatagccatgggaggaaagaaaggaactggcaagaaaacagggacccaaagcctgaatcactcatagatgaagtagctgatttcttatctatgtgatcttatccccccatcagatgagacattaacacagagttgtctgaggcaggtggagaaggttaagggagctataaaagggtatcgggctacagtgctttcatagagaatatatatgcattctgtttctccatttttctttggaggatttaattcttttcttcctatctttccaattaaaatgaaaacctatggtatgatttattacaagaagctttacttaacttctaatagtctgatctcatttccttgaataaaaatgacatcacagtaaaactagattataacatttttaggctttgacataatacagacctatgaattgacttaacccactgaatagttatagaagtgaataactaagctgtctgtgtaatggggagggaaaggaatgtgaatcctttatcacacgaagtaaaccaacaacatagtacagttttagagccacaaggcagatatgaggacgcacctggtcactcgtgctaccttgcccagggataaaggattttcacctagagtgcatgtaaacatctctacttgcttacctgagtgcctattcagctgtaaccccagttctttcttatttctcctacatttaaaatcacttaacaggctgggcacagtggttcacacctgtaatcccagcactttgggaggctgaggtggacatatcacttgagatcaggaatttgagaccagctggccaacatggtgaaaccccgtctctactaaaaaatacaaaaattagccaggcatggtggtgggtgcctgtaatcccagctacttgggatgctgaggcacaagaatcacttgaacctgggaggcagaggttgcaataaggcaagatcgtgccactgcactccagcctgggtgacagagtgaaactctgtctcaaaagataagaataaataaaataaaatcagttaataatatgataccggaataaagaccacacgtaatctgctcaaatctaaagggacatgcaatggaagcttaaatacaccatgttgtagttgaaaattgttttaggaaggggctggacagtgagaacgcttattgccctacagagagtgacatgtcaggatttatagtcggaaaatatatacaaatagtctccagagttttaaatcatctgctcattacagaacctcatttcaacataacagttctctggtgtatgaaatggatggaagcaaaagttatggtagatttacaaaccaaaattcaactatgtctcattttatgtatgtgagaggatggcatgcatccatagtcccagctacttgggaggatgagacgggaagatcatttgaacttaggaattccagttcagcctggccaacatagtgagacctcatctctgaaaacaccaaaagtttttttttttttttaattaaaaaaaaatgtgagaggacagaatggtatattaagagagtatgagtttcagaatctgacccctgattctggcctgcttggcacccaatccttgggcaggtttccagctctctgagctgttttcttcctctgaaaataaagccgtctctctagccagggttgttagaaagatcagtacttacatgtcaggccactagcacacagcctagtaaattaacaatggcagctgctatgggacatgacatttcatgtctgaaacatatccagggttttgtcaaagagcaagtgttcagctatagtctttattggtgaagttttagcacatttattgggcaaactctagtttcatgagatacttatataaagttttagttattgacacttttttctatttcatagccacattggtatattttttgcttataatttggctacaggaggggattgaatatagaattcacaagtctaaacttgtgtgtaaagttggctcagtttcgtctaccaaattagagtgatcctgccctccaagtgtattgtaaagtgtaatagaaataaatgggagagaaggctcttcctcacaatagtagaaagaattatggagttagaaaatcaataggctgggtgcgatggcttatacctgtaatcccatcacattgggaggccaaggcagaaagatcacttgagctcaggagttcaggaccagcctgggcaacatagtgagaccctgtctctatttaaaataaaggaaattaaaataatagaaagagaaaatagatgcttacatcagtaaatacaagtgtttttttgtttgttttgttttgttttttgagatggagtttcactctcgtcacccaggctggagtgcaatggcacaatctcagctcaccgcaacctctgcctcctggattcaagtgaatctcctgcctcagcctcccaagtagctgggattacaggtgcccactaccacacctggctaatttttgtatttttagtagagacggggtttcaccacgttggccaggctggtctcgaactcccaaccttaggtgatccgcccaccttggcctcccaaattgctgggattacaggcgtgagccactgtgcctggccaaaattgttattttttaacaactttctgagtgcttggaattatgaaggcagcatttgaaatttttgaaagtatttccctacactttaacctaatcttaagccactaatactgtttaagatttaaaattatcttggcagtcgaagaagtaaaatccagaaaagataaatgacttgctcaagatggttcctgccaaatctagaaccttcatcccatggcctcctgggattgggttttttcatagactatcggcttaagtgctttttggaaataaaagaaaatgtaaatatataaaagataagaaagcaaaattgtatcttctctggggtagtttagcagtagttctgtcttaaagagaattagaccagagagataccatttctaatttgaaactctttggttctgtgaaattggttaaagaggctaaatttgatacaagatctgtctctatgtgatgagccctttgaatattactcagtacatcacggtgaggggtgggtggcctcgtgtctttaggactcttccagtggcatgtgagcaatagcatctgttaccatttctacatgaaatgattggccaatcccacaggttgggctgtctcactcactgagaagcagcagggcagagtggttagggaaaggtgatggagttggataccagcatttgtgtgtctgctctggccacttgccagctgagtgactctggaccaggataatagtgaagatgacaacaataataaaacctgcctcatagggctgttgtgaagattaaatgagttaatatttgcaaagaattgagaatagcacctggcatatagaacatgctatacaaacatttttaaactgtggcaaaaatcggccgttttaaccttttttttttttttttgagatggagtttcgctcttgttgcccaggctggagtgcaatggtgtggtctcggctccctgcaaacttcgcctcctgggttcaactgattcttctgcctcagcctgccgaatagctgggattacaggtgccagccaccatgcctggctactttttgtacttttagtagagatggggtttcaccatgttggccaggctggtctcgaactcctgacttcaggtgatctgctgcctcagcctctcaaagtgctgggattacagatgtgagccgccatgcctggcccatttcaaccatttttaagtgtacgtctctgtggcattaagtaccttcacattgtcgtgcagccaacatgaacgccccgttctctcctccccaacaacccccagcaacctctattctactttctgtctctatgaatttgactactcttggtacctcatataggtggactcatacagtgtttctttttgcgactggctaatttcacttagaataatgtcctcaaggtttatccacactgtagcatgtgtcagtatttccttcctttttaagaatgaataatattgccttgtatgtatataccacattttgcttatctgcttgtctgttcgtggactcttgagttgcttcttccttttggctattgtgaatagtgctgctatgaacttaggtacaaatatctgctggagtcccagctttcgcttattttgggtgtatacccagaagtgggattgttggatcatatggtaatattatgtctaagtttttgcagaattgctgtactgctttccacaggagtggcaccagtttatatccctaccagcaatacacgcaggtttcatttttttccacacctgcaccaccactcgttgtttttttaatgcattttttaatatgtaaaattattggaggaatttattaaccagcagtcatatatccagtgttgttaagttgttgccttagtctttttaaagaggaatgagtaaaatattttgacgaaggaagatttgggaaatcttctggttaatcagatgctggttaatcaatgtttaccagcaaagccctccttctgtgtttctagaaccctccttctgtgtttcatctaacctctccttgatctaatactcccacccccatcctttgcactctacttttaaggagaaaggcaagtcataggtagtaagtttataacaagaattcgtttagaaccaaatggctttttggtttatgtactgcagtgtgtaaaaaatgggttggctcagtttcatctaccaaattagaatgatcctaccctccaagtgtattgtaaaacttttatgaacagacttagcatatccagcataaaagtagcccatccgtgaaaaaagatgtggggaaaaaacagatggaatgagaaagttctggttcctctctggcctgtgttttccctctggcctgtgttttccctcttgacgtgcttccttactttgtgagcacaagtttcagtgggtgccaggggcaccagtgcattaagaaggtcatgcctattttgcgaccagtttccagaaggctctgcggatcacagagattggtagtaacatggggcatagcccaattcagcaggaaacagttaagagccgttgtcggccaacctccccaacagcacttgggttttcctgttgagagcagggactgagagacaggactagctggatttcctaggccaactaagaatccctaggcctagctgggaaggtgaccacatccacctttaaacacgaggcttgcaacttagctcacactcgaccagtcaggtagtaaagagagctcactaaaattccaattaggcaaaaacaggaggtaaagaaatagccaatcatctatcgcctgagagcacagggagagggacagtgatcgggatataaacctgggcattcaagccggcaatggcaaccccctttgggtcccctcccattttatgggagctctgttttcattctattaaatcttgtaactgcaaaaacaaacaaacaaacaaaaaacatggggcatagccacgtccgtcgagagctgccagaatcggtgggtctagggtcttgaataagatgcttcttcccaggaatgatgcctcccagctgggttccctaagctgcctgcacatgtttgaccaagtgtgagctaagctggggtgggtgcttggttggttaaacatgaagttgcttatgtggcctgagacctctgggctgttaaaccaggagctgctggtatgcagacctatgcagcccgtggggtacacatagcacatcttctcaaaaatgccaattttactaagtttgggggtgggaaccccttctattttaaatactgaaacacagataaattgtggattaaaatgaaaaatggatgatttttttaaaagggtgagacagacatgatactttatgctaattggactttgagctgtgcccccaaatattccttttcaccccttgttcattccatgtgtttcctctcttctgcatgtagggttttctatgaaaaagcttattgctgcacaatttgggaagcctggggatgtgtggaggtccagagagactcagaaaggctggtttgcatctcctaagggtagcgtggctggtaagagtcagactgctgcatggctgtgctcgccatgtgtcatctgtgatcttggacaaatggttgggctgtctcaagcctctgtttccactctgtaaagtgggaataataccagtgtcataggattgttgtgggttaaatgctgtgcaatgaagaggagctggtgctggctttgtctgtgtctgtggaagggtggataaggagatgaagcctcacctgctgcttctattagtgcctctcctagccctctatccttacttattcatgtagcaaggtctctacatgctggaattcacagccttcttttattgctggatctcttctctctgccctttgtctccccttagataactctaactcctccagacctgatatcaagatgaaaggaaggctggcttgggatctggagtagctgaagatctggagtacctgaagactactccagaggactttacctccaagggcaagaaacccatctggtgtgctgctcaaggctctccataagtggaagcatcaggatagtagtgggtggagcactaggagaggaaatggggaagcaaggattttgaagggcagatgagagccattatctttaatctccatccccattcccatgggtgcagctctaaacatgttgcaagaaaaagcagatccacatggactatgaatactggtcaactggcaaaatgagcttggtttgagtattaaattaatagtaattattataatatcatcagtgacttaacaattgatgcccagtgaactgtacatgattctcttgcaggtatgtgtattattaggtgttccaagtcagccaccttgaaagaacttttatcaatagaatgaacatctgcccagcttcttgattttgagctgtcacctgatcttctcactttcatctcacaaccgtactcctctcatctacccagcttagaaacagctgtaaaatgacctgggggtctcccttcacctattctggagaagctcaaagacttggaagggtggaggggaatggccctcttagctgtgtccataaaacagagactttgaaggctgaggattgggacagaaatgtgccttgatgtgtgtgtacgatttctctattcttgtcttcacttctccagatgtgttttgcacctaacttcctttctctcccgtccttcaaacctgacttcaaactctcttcatctagaaaactggctctgattaatcccattattgaacaacctcttttccctccctcggcttttctattctttctactttaatgagttggtactttttccaaaggagctttataacttttctccagctgttaaatgggtcttctcctgttagattgtaaactgaggtacaaagtccttcttccaccttatcccttttctctacccatgaagtgccctgcaactatttaaacattagttagagactttgccatgtatcagaagaaacacattctgttgttgtatttattggttttaattataaagcagttggaatgcattttaggattctgaatctccataattctctgccagcactttgcacctagtggaccattagtaggaataattttccatccctgcctagcttcataattgtagacacttctgctgcacaaatgctggcagggctctcatgacttaattctgaaattgtatttagtggctaatacacagagaagatttggctatctcctctggtctgcagctgacatgtggcatgagggaatttacatacagtaccacgatccagttcccagccaagaattaaacgcctggaggagatcagttatttaaatctgaagcagtacagcatgaattatatttaaggtagttgctgttctggctcttgtataaagttctttcagctctgggctaaagaatcataatacctgaaaaccttcatgtctgttgtatgtttataagaacatccttttctaaacttgggaccatttactttctgagagcagtggtactgcatgttagaacaaaaagcacacaacaagccaaaaccaaaatgtttgcagctttgttgccctagtggggtaaattctttcccatgagagagctgttctctgtgtattttatacactttccaagtagtttacacaatcacgggttgtatacattatcttcagcctgcaaactcgatgtgaacctcacccactcttgccaacccaactcccttcccacatcagccattccgtttcctcctactgcttcctgtgctgttgacctaaaagaataaaaatgtttgcactaatataatagggtacctccaaaacataaaggtcagtgaagactaaacaaaaaccaagaatagttttaaatacacaccaactctatagagcaatctattagctctaggaccttgagtaaagcacttaacccatttgaatcttagttaagtggaggtaataataggaggtaataatatttgtcccatctatctgatgagagctgttttagtcatatgagagaatttatgtggtagcactttataaatatgtactacttctatgaaactgaagagctcagcatgtttggttcaagtcttgctgcttgctgttggcaccatatgcagtgttttatgacttctcatgagtctggtctccttacaaaccctaaatgtgtggacctgagctgattttcatatcctacttaaaccagagaaacttcttgctaatgagaactagcctaggtggctttagtcctgaatctaatcacattgaaatatattcttgatccatgactgtattgtcaacatatccccatttgcatagtatgatccacttgagagctgagtttttggcaatcttttttaaattgccctgaatcatgtgttaattcacactcactaacagcatatgcttgcattaatagcacccatctgttcaacatcatagtcttctaattgtgtctgttatattaaacttctcttccaaatataagttttgacttaaagtcagctccttagtatatccctggaacagtgaaatgcctttatgttttgtccccttaattgaacaagcttgtctttatgtaaattggcatattggggtgactttctggtgccaagccatggcttgtttccacctccaccatctgaagtcacgaagtgtgctggctgttacttgttgacttcctttttcttcccccataccgtgctcctcttcctcttgttccttctattgccagtcctgcctatgaaaagcatcaccatgtttttctttcttcttctaatttggatttcatgtcacacaggcttgctgcagccttctcgtcactgtccaggttaggttcccttccattcattctctttcactcacctcttaccctacctgttttctcccattagcctgtcacacccacgctatctctttaggccgttgggccttctaataagatatcatggcattagtcatcttctgatcacttcctctctgctgcctttgaacttctgtgatttttaaaaatacggtaaaactgactaaatattcattgtacattttgaatgaccatgatccttttctagaagttcagatagatcagttagatgcatgaaagtcatcctttgcagtggacctggtattaatgcttattcctcattattattatttttttttctgcaactgaacattaaaacaaatttaggctggacacagtggctcacgcctgtaatctgagcactttgggaggccaaggcaggcagatcacttgcggccaggagttcaaaaccagcctggccaacacaacgaaaccccgtctctactaaaaatacaaaataattaaatgaacgtggtgatgtgtgcctgtaatcccagctacttgggaggctgaggcatgagaatggcttgaactcaggaggtggaggttgcagtgagctgagatcacaccactgcattccagcctgggcaacagaatgagactgtcttaaaaaaagaaaaaaatttaatctcttgttatttctgatatagatatagtaaagtaatacaggtaaatggtatagaatatttggaaaatgtataagaattaaaaaaaaaaaaagaacaaatctgacctcaggtgatctacccgagtgctgggattataggcgtgagccaccacgcccagcccttgtttttttcttttctttttttttttttgtttgtttttattatactttaagttctagggtacatgtgcacaacgtgcaggtttgttacatatgtatacatgtgccatgttggtgtgctgcaccattaactcatcatttacattaggtatatcccctaatgctatccctctaccctccccccaggaagggggacagcccttgttttttcttttgatcttattacaaccctggcattcctcatgtgatctaatttgtcaatattgaatattaatttttttctgttgctggactatatttgagatttttggatctctgagaaaaaagcctataattttactttttatactttcaagatagtaacattaattttatgtggttttcagggaaaaacaaattcacacaaatctatctgctgattaacaagatatctataataatagcgacactctcagaaaagcaacaccctcagaaaagcctaatggctgctgatgtcatcaagcatttacatgcagggagatagtggcacttcagtttagtagaaagatcatgaactttggaaccagttgttttgaatcccaattctgccatttacctgtttttatgatcttagaattaccaaagactaaattagctaacctctctgagtttgtttcctattcgaaaaatgtattttccaatcaattcctatctttttttttttttttttttttttgagatggagtctcgctctgtagcccaggctggagtgcagtggcgcaatcttggctcactgcaacctccgcctcccaggtcccagttaagcaattctcctgcctcagcctcctgagtagctgggattacaggcttgcgccaccatgcctagctagtttttatatttttagtagaaacggtgtttcaccatgttggtcaggctggtcttgaactcctgacctcatgatccacccgcctcggccttccaaagtgctgggattaaaggtatgagccaccgcacccagccttcaattcctatcttaaagaggaatgcagggactaagaagtaatatatgcaaaatatgtgatgtagtaagtgcatgttaagtattaatcctttctgtctgtgtttttttattaacacatcataaagagcttacattgattagaggaataagttatgtgctgtataatatacagaaaaaaaacccacttgtaaccaagagattgttttattttcttgcatgtaccattgaatcatgtgtgatctattttttcatttttcctaatagtcaagggaaaattaagccaaggctcactgttcccttgtcttctaaagcctccaactttgtaggaatatcctctgctattttactatttggggtggtttttgtgaggatagggacagggtgttagcagtgacttgctactccttgggaacagcccagaggactgttgttataagacctgctaattctgcttaacagttgtaaaatattattatttctatggggcattaaagtttatgtaaatatctgggtctttaaactattcattatctatagagaatagggagaattactttaggattggttctaaataacttgagacattttgccctgaccaacagttaaagcataaaaggttcataccgagtcatagggagttgagtttctttcccttcttctaaatatagtagaagcttatccaaactaaagatttttaaattaccttctgttgttggagttaaattttttaaattggccttggaaacttgacacttcattctttcttactgagatctgtatggggatgggaggacagagtgtataggagcaggcagtgggcaaatggaattttctctgtgcctacttggtaataagtaagaggtttggtttccaaactgtgtcttgaaattgtaattgtccaagaaatcccaaatctaggaatcattgcctataattcttccaaattaagcagggttctagatacaccccacccacaaacccagtctgcaggccagccctctgtatatgggccttaatgtctccatgggctgctttgggtttctagataatgaaaaaagaaattagatatatatatattttttaattattattatactttaagttttagggtacatgtgcacaatgtgcaggtttgttacatatgtatacatgtgccacgttggtgtgctgcacccattaactcgtcctttagcattaggtatatctcctaatgctatccctctcccctccccccaccccacaacagtccccaaagtgtgatgttccacttcctgtgtccatgtgttctcattgttcatttcccacctatgagtgagaacatgcggtgtttggtttttttgtccttgcaatagtttgctgagaatgatggtttccagtttcatccatgtccctacaaaggacatgaactcatcattttttatggctgcatagtattccatggtgtatatgtgccacattttcttaatccagtctatcattgttggacatttgggttggttccaagtctttgctattgtgaatagtgccgcaataaacatacgtgtgcatgtgtctttatagcagcatgatttataatcctttgggtatatacccagtaatgggatggctgggtcaaatagtatttctagttctagatccctgaggaatcaccacactaacttccacaatggttgaactagtttacagtcccaccaacagtgtaaaagtgttcctatttctccacatcctcttcagcacctgttgtttcctgactttttaatgattgccattctaactggtgtgagatggtatctcattttggttttgatttgcaagaaattagatattcttattcagatttacacagcggaccaaatgaatttttctcttgtgtgaaatttataaataattcttctattctggaaagacatcctgggtttggagacccaggcttggtttaaaaacaaatgaacagtctgatgcagtggctcacacctgtaatcccagcactttgggaggctgaggtgggcatccctcaggaggtcaggagtttgagacctgcctggccaacttggtgaaaccctgtctctactaaaaatacaaaaaaaatttagcctggcatggtggcgcatgcctgtagtcccagctacttgagaggctgagtcatgagaatcgcttgaacccaggaggcagaggttgcagtgagccaagatcgtactactgcactccagcctgggcaacaagagcgagactctgtctcaaaaaaaaaaaaaaaaaaaaaagagaacaaacaaaaccaacaagtgttaagtagatgtttgtaagtatgaaaatagtgtggggacttttgtatgaaagtgggattaaggaaccctctttcatgtgtagatcctgatgccatgtacattgaaagcatatttgcagaaaaggataaattattttcgtaaagcctaaactatctctccattttcctgcataattatgacaagcttcttaactattccaggccctagtgacctcactgcaacaaagagggtattggcagccaatcaggaactctaactcttgttggtaaacttgtcttgtcactgttagttaccctcacttctccacctgggaaattcttctaatgccaaacttgaagatttggggctttgtgttattatggtaggtggccatagtcgcttacagccttgtctaacccgaatatcctctgaagttgtgtgttgatttataactttggaaggttcttagaaatgtgtcatgggggaacagttccaggaatgatgtggaaggcaggctttccataaagttcccctgcccttagtatcttgtgtgactattatgagagcagcaaacttcgtaggactaaacttggaaggacacagcatctctgccttgaagcacaaagttgagcacaccattcagcagcctttactaagcacctattatttcttttgcccttggtagggatatagaaatggatgagactcgagggcctgtgctcagtgtctcataattttagtgtcttgatgaagccatgtttttaacatgggggtggcagtctctttcatcgtttcagattctttagagtgcctgtgaatacgtattggtttactaacaacttcggcctagggtttgcctatttttcaaaagaaaattcagtttaaggaagtttgattatgtagtcctttaaagcttaagattaagcagttgtgaaatacttttggaagctggtatgaagcaggaatgtaccacgggtcaaatttacagagggtatcagcttacctgaaatcttggactttaggttctctcatctttatattccattctcccattcccaccccagttttagtgtcttggaatcagttctcttccttctagtgtgttctttgatgtataaatgccatctctgataactattctttaagttgtgagagggggcagatatccttttaggtattttcttccagataaaagcagttcccaactcttagaagatggttcaatgaacaattgaaatgaattatctattcaagtatacttaggattccttgtagaaattttgaaacacatagaataacaatgtgtatttataatgctaaggctgggcaccatggctcactcctgtaatcccagcactttgggaggcgtaaactggaggactgtttgagctcaggggtaagttcaaggccagcgtgggtaacatagtgagaccttttctctactgaaaataaataaaggttaaatttttaaaaatacaaaataaatgctaaattgtggacatatttttttctttctttctttcttttttgagacagggtcttgctttgtcacccaggctggaatacagtggcgcgatcatagtttgctgcagcctccacttcatgggctcaagtaatcctgcctcagccttccgagtagctgagactataggcttgcaccaccacactcagccaattttttgtatttttttgtagagatggggcttcaccatgttgcccatgctagtctcaaactcctgaactcaagggattcattcaccttggcctcccaaagtggtgggagctaccccagccggacatatttctatgaattggtaattcctggttttctgcttttccttgaagagaaacaccctaaataataccctattacagaacagattccaagccctggttttggggcctcttgccaaccctcccttcaatatatccctcaaatctaagcatttcgtaattatgccaaactttcaattgtttaataaaaactttgagagaccttttgagtcatattcatcactttgtgttccatctccataataaactggcaccaagcagccactcaaatgtttgttgaacaaatgagtgaattttaatacaaagtgtatggtggccttggtgtctctgtgtgaaggtagcaggtagagaataggggaaattaaacagcgaccatgtcaactccttattgaattaggtagattttgggctatttttacattggattttgtacgtgttctttgggaaatggactcctaaaggaccctttcatttctaatttatacttctatttcaaaatactctctaacaacttgctttcattctgctccttgaatctgtgaataagccttattgtgtaattttcatagaatgcaattgctttgaactgtcatctgatgctgcaagtggtattttgtgagttgctaatacatcagaaagctgtgttcttcacaatgtcctcatgttttttgtggttcacggcagcaagtaaagatgaactgtggaggttgcagttaatcaagttactttaaaatgaaaagaattttgaagccacttaaatgacctgcttcttgggcttggcagtgacaagtcccttcctgggcccacttagatttaacagcaggaggtactgggcaaagaataagggctgcaatgttgacagaccttagttccggccctggctttaccattgacccagcaaatagctgtgggcagtccctttcccttgcttgactttggtttcctcatttataggaaagagataatgcctatctctgagggtgatcatgagaaccacagaaccacacagtaacatatggaaacgtcctttataggcagtaaagccacatcttaagtgaattattttattagctccatgatggatctttaaatgacagtgttattatccatgccagtggttcttatcaaaagccactacttagtaaatattgagtaatgcagaaatatttgcaggcagtctctgtggcccagaaggacttgcttttgctgttaagattttctcaaattccctaaccttcctagacttacaatttgacagtagattatgaaaggtgttctctcccattcaaggaaggtgaggccaaagtgtgtgtagttagaaagtcagtgggccaggcagaaggtcagaaggcaaggaatgggtatgtacaaggaagtcccatgagggtacacattttttatacttattaccctgtgtctggtgctttgactcacatgtggcacatagaacctacgaattgaacattagttgagtaaagtccacagaatggtgctatctttgctccattaatgatcatactcttattgagtgtaaataaataaaattacctcacagagatattttggagccctttgggagcctttcccgataagatattttattttttcatcatatatttttacagagcatgcagcctgtgcagggaggtgtgctgggcaccatgaggacacaaatacgtcttctaggagtttactgttaaccaaagcaggataggagggcattttgagctgagacaatcaggaagactttgggaagaaaagtgcccactgggtcaagcctggaagataggtaggatcccactagatggggtcaatatgttgcaattgcaatttaaagctttgtgggtgtgtattttaattcacacattaagtaaaatctcttatttggacaggatgataacagagtttgggagcccctcagcagctgtcctgggctggtacaatattgcatggtttgtggaggcagttgtgggcagaggccgagggacggggttctgctggggcttctgtcttctgctggggggttagttgaggccggaagggtgcagcagcataggaaagatggggagagcaccgcctttttaatgtgactccagtgcccactcttccaagttggggatggtgtgacaagcacatgggctcccactaggagttttattttggatccaaaccttactgtttctgaagtacttactataaaatgaaaatatcctgtcagaaatgggaaagtctttaagctgaaattaaaaagagaaactggaaatcatgaggtatcttggggattaactgttcagaacagtagagatggaggattaggtgatggtatgtgagtgtggcaggtatcatttaagaaaacacagggaaagaaatataactttttttttgagacagagtctcatactgtcacctaggctggagtgcagtggtgccatctcagctcactgcaacctccgcctcctgggttgaagcgattctcctgcctgagcctcctgagtagctgggattacagctgggattaccaccgcgcctggctaatttttgtatttttagtagagatgggatttcaccatgttgcccaggctagtctggaactcctgactcagtaatctgcctgcctcgacctcccaaagtgctgggattacaggcgtgagccaccgtgcctggcctaaaaattataatttttaaagtctattcattatggagtaatgatgagctcacttagtgaggattcactggaaggtagtttttctgtacgcgcagagtgctatctatgtgcaaggagccctgacaaattggcaggagacatgaagatgatcaaaagcttcctctaaggatcccctagtttggagagacagacagactgatttacagtggggggcttttctgatgagtgatgtaataaaaatgtgaactaaagtgccaaggagagccaatggatttagattcagagatccatggaattttgcctgagatgatgtgaaaggcaccacctgcagaaggtgggagaatggctttccaggcagagagaagggtggagcagaagcactcagcgttggagggagtggtgtggtcctggaacacggtgctgcctgggagctctggctaaagtgtgggcttcctggatgtggggagatgcaaagtgctctagaacttgttctgtaggaaataggggagccatcaaaagttttgagaggggaagtaataaggaagacgcttctgttggccatggggagaatgagtggaaaaggggtagtggctgagtgactagacctgttctgagagttttatgggagagacattaagacctggactctcgcaatggaggtgcagaggaagattgagagcttctgtacttttctgaaatgtgagagctcagttttaaagtttagattggactgagtttattaaagaaaaagaaaatgtttttgacacatgtcaatctttgttgacacccgttggtatcaatgctgtggggtgaggtctccatgttcaaggaatggagccacaatggaaaattgggagtggtaggaagggggatgggacaaggatgaggacatccatggaagctcctgcccgtttgcacactgctttttttttttttttttttttttccctgagactgagtctaactctatcgcccagggtggagtacagtggcacaatcttggctcactgcaacctccacctcccaggttcaagtgattctcctgattctcttgcctcagcctcccaagtagctgggactacaggtgccccccaccacacctggctaattttttgtatttttagtagagatggggtttcaccgtgttagccaggatggtctggatctcctgaccttgtgatccgcccacctcagccttccaaagtgctgggattacaggcgtgagccgccgcacctggccttgattcacttgttagaaataatactgtaaaaataaaaaaactagccaagtgtggtggcgtgtgcctgtagtcccagctacttgggaggctgaggtgagaagattgcttgagcccaggaggctgaggttgcagtaagtcatgatggcaccactgcactccagcctgggtgacagtgccagttcctgtctcaaaaaaaaaaaaaataaaaataaaggaaaagaaatgatattgtaaaatccaaaggcaaatttctctctctgcctggtgtttcaatactcctgtctctgaatgttaaatgttcagctgcatatgatttttttctgattgattgtctcaggtgtttaatgaagactgcctttgtaaatcacatgttgttatcctctatttctagctattgtggacgatgaaaggctctctgcagaggagatggatgagaggaggcggcagaacattgcttatgaatatctgtgccacttagaggaagccaaaaggtaagatccagacttagtctatttgtgcaccatctcttggagataagctttgtgataagggcgtgggatttgatgaccagagggttctgaaatgggccagcaattctaaagagttgtcgtagttggagatggccagggagagattcttgcctgcactcagtgatttagatttggccaaacctcccatgccaggaggccagtgggctaggggatgacccctccacactctgctccactcctgagtcacagctgggtgcacatcacactcctgtgcatatgctacatagttctaataactcatttgcagtcttgttggcagcaggataatgggagaagaagcatctatttcttgcaaatggttgggcagagttgagaaaaagttgatgccacagccaaagttgaggcactaggaggaaggcaactattcatttccctgcctcggagcctcccaggaaatcacggggccaactgcagattgtttcaaattcttcatctcactggcttggatgtagaggagcaacaatgacttaaatcaacttcctttttccgcagagcttccttgggtcttttccccactcgcagcccaatgatgataaatgcccagcaggacagtggcatatcagactgaagtccatcagtccctaagtaggtttatgacagcaatctcctctttaaaccgtgggtgtgtggccacttagggtatattgtctctaaaatcacattgactcttttaggctttttagattaaataaatgttgcgttctccaaggagaaagtgaagataaagagtcctaagtgcaaatactttcctcatgagaggaattgagagaactttatcctttgtggggtgaatactacagagttcatataccatgagttagagtttgattgaatgctttatgccagggtggagcgacagtattgttccctggacaaagatatgttccagccctcttagctatatagaaataaatacttggttaaatggtcactggtgttaattatctctgatcactgatgaatggctatctacagaactagaatgatgaggtttttaatcagtattttggtgacacatgccctaatttgacatcaaaattgctttcaaggggtttctcagagttgtttaatattttagtagtgtcacgtaactttctttaggctctaaaaaccaagttttaaagattgtttaacatgtctgtgaagtctacagttaggttgcaggatgctagcgattcactatcagtctaagatcattaaaaacatgcttttagtcaagttgtcgcaaaaaagttagataaggagattgattcataggcattagaaagaagtggtcccaaccactcctgaggctaaggtgggaggatcacttgagcctgggaggtggaggctgcagtgagctgagatcgggctgctgcactccagcctgggtggcagagtgagacgctgtctttaaaaaaaaaaaaaaaaaaaaggaaaagaaagaaagaaaaagaaaagaaaaaatatactttcagtgaataagttcaaggagatagtagaaaaacttacttttctattgatactcactttacattttgtttttgcctcctgtttttaacaagtgggaaggggtgtcatgtagaggaaaatgatatgtgattgggagttggtttgcctaacttcctggtcccagctccaccacttacacaagcagcttgaccttccacagaccattttacctgtgggaagttcaatttgtcccctctgtaaatgagacaatcaagatgatgttacttattgccctacttattcatggattcaaggatttttaaaaaatcatttaaagaaggtgaaagtattctgtaagctatagtgccagtcaggtttatggtgataacataagcaaagttttctcctcagtatattgaaatggtataaatgtagcttgaaagcttgtcatcttctctagtatttttgaaattctgtagttgaattttgtttcagaaagtcagcataatgattatttcagattctttgaggaaaactttccttggaatagtttcatgaaaataattatcaaaatgtacaatttttcctctaagatggcttttcataaatttatttgatgagtatattagatgtagtatatatttatgaatcttttattaagacacaaatactttttttcttttttctttttctttttttttttctgagatggagtctcactctgtcgcccaggctagactgcagtggcgggatctcagctcactgcaacctctgcctcctgggttcaagtgattctcctgcctcagcctcccaagcagctgagattacaggcgctcaccactacacctggctaatttttgtatttttagtagagatggagtttcaccatgttagccaggctggtctcgaactcctgacctcaagtgatccgcccacctcggctcccaaagtgctgggatgacaggcgtgagccactcactgtactcggccaagacacaaatactttgaaagaagctgatttttggtcatggattatataaaaatttgtggctactactagacatatagttgtgctgatttaagaaagcatagtgcacagaaaactcatggtcttgaatgcaagaaatacaggaaagggtgaatttgtctttcttgaaaagatgagaggatttattgcatgattcttttaaagtattagtacctttggaatttgtgatattgggtttattataatgcacatatgtgtgttcacatgaatggagttgacttagaatattgagtttctactaaattgtatgcttgtactgtatatattcatctaggaagtgtttcttgtttctgatttcagttgaaatgactttattgcattttaattaaaaatgtattggttctgtctttgcacctgtttttctttctggaggtgagaattggaaggtatctagtttgtatatcctgtaacttaagatttttacaaattgagaattataatattccagtatatcttttattttggttttattaatttcaaaattctataataaatcaggccattgaaaagttctttattcagaggggacatcactaccaacattacagaaatacaaaggattataaaggaatactatgaacaattacatgccaatgaaaacttagaggaaattgacaaattcctagaatgacaagctactaaaactgactcaataagagacttaaacatctgaaaaaaactaatataaacagaatgagacttataataagtgaagagcctgacttagaaatcagaaaacttcccacaaacccagataacttcacagtagaattctgccaaatgtttaaagaagaattaagagcagtccttgcaaactcttccaaaaaatacgaaaagagaaaacattttccaattcattcttctgaggcctacattaccctaataccaaaaccagatagccatctcaagaaaactaaagaccaatatctcttatgaatacaaatgcaaaaatccttagcaaaatactagcaaatcaaatccagcaacatataaaatatatttaataccatcaagtgagatttatcctaggaagcaagcttggtttaagacctgaaagtcaatatcatagaccatattaatggaagaaaggacagaagccatatgatcatctcaatatatgcaggagaagcatttggtaaaatccagccccctttcttgacttaaaacgttcaacaaactaggaatagaagagaatttcaacctgataaaggacatctatgaaaaacctacaagtaacaccatactcagtggtgaaatacaggaataaggatgttttttcttaccacttctgtttaacattgtactggagattttagccaggcagttaggcaagaaaaataagcaaaaggcatccaggttagaaaggaagacgtgaaactatttctaagggatgttttctggtttatagaaaatccataggaatctactaaaaaacagaacagaagaaaacactaagaaaaccccaccacaatgagtccatcatggttgtaggatactaggggagtgtgtaaaaatggcatttcttgacacgagcaataagcaatctgaaaatgaaattaagaaagcaattcactatatgatagcattaaaaacaataaaattcttaggaataaaattaacaaaagaagtacaagaattgaacactgaaaactacaacacattgaaaattttaaaactcttaaatagacagaaagacatctcatgttcatggattggaaaatagcattaagaaaacaatggtcccaaattgatttatagattcaatacagtttctagaaatattcccagctgccttctttttttttaaatggagaaattagaaagctgattctaaaatttatatggtggccaggtctggtggcttgtgcttatcttccagcactttgggaggctgagatgggagtattgcttgaggccaggagtttgagaccagcctaggtaatgtagcgaaaccctgtctctgcaaaaaaaaaaaattttgaattagctagatgtggtggcatgcaccagtagacctagctactctggaggctgaggcgtgaagatcactcaggaggctgaggatgcagtgagttacgatcacaccactgcactccaggctggatgacagagcaagaccttgtctcaaaaacaagaacaaaaataaagtttatatggagatgcaaggaatgcagaatagtcaaaagtgtcttgaaaaagaaacgcaaagttggaggactcatttttcaatttcaaaacgtacttacaaagcccacagtaattgagacagtatggtactggcataaggatatgcatatagatcaatagagtagatttgagagtctagaaataaaccctaacacttctggtaaactgattttcatcagcagaataaagtcaattcactgggagtgagagaagatgcccttttcaacagaggatgctgactactcagtgtctacatacataaaaatgaatttggacctctgcctcacaccgtatacaaacattttcttaaaatggattattaacctaaatgtgagagccacaactgtaaatctctccagaagaaaacaggagtaaatctttgtagccttgggtgttaggcattggtttctgagctatgacaccaaagcacaaccaataaaagaaaaacagataaattagacattataaaaactgaaaccttttctgattcaagagataccatcaagaaagtgaaaagacaaatcatgtgtctgataaaggttacatgtattcagaatatacaaagggttcttaagtcgggtgaggtggctcacacctgtaatcccagcactttgggaggctaaggccagcagatcgcttgagcccaggagatcgagaccagcctgggcaacatggtgaaaccccatcgctacaaaaaaatagaaaaattagctggatgtggtggcacatgcctgtagtcccagctactctggaggctaaagtgggagaattgcttgagcctgggaggtggaggttgcagtgagctgagatcacactgcactctactctaacctgggtgacagagcaagactctgtctcaaaaaaataaaaataaaagtaaagcacttttaaattctacataaagagttaatagcctaattttaaaatgggcaaaagttctgaatagacatgtctccaaagaagatacacaagtgatcaataagcatatgacaaggtagtcaacatcattagtcatcagggaaatacaaatcaaaaccacaatgagatgttacttcatacccaccagcgtagctataatcaaagatggacaataacaaatgttagtgaggatgtagagaaatcaaaactcatacattgctgaacagattgtaaaatggtgcagctactttagaaaatagtctggcagctctttaaaaaattaaacagagttaccatatgacccagcaattatcctcccaggtatatacgaatgaaaattgaaaatctatgcccatacaaaaacttgtactcgaatgttcacagaatcattattcataatgacaaaaagcagaaacaatccaaatgtctacccactgataaacggtgatgtatccatacaatgaaatatttctcagctataaaaaagaatgaagtactgatacatactacaacatggatgaaccttaaaaacatgttgagtgaaagaagctagacacaaaaggccacatattatatgaaatgtccagaatagacaaatccacagagacaaagtagattagtgattgccagggcctaggggaagaagagaaatgctgggtaactgctactgggtatgggatttctttttgggctgataaaaatattctaaaattgattgtggtgatggttgcacaactttgagtatactaagaaccactgagttgtttactttaaaagggagaattgtatggtatataagttgtatctcaataaagctatttattaaagataatttccttacactggcttggagaggtccttaggaagctgttaaataagatcaattggtattagcagatacattgcatatagaaggtacccctaagatacacgagatatctaaatactgtgtttgttttacagatatttattgagcatcctttatgtgtaaacaagcctaggagggttgttttgggagatggagttcaggcaacaaataatgctgtgctcagaaaaactcgccatttggttgaactttttactcaagagtttaaagttattttccttcatttatgtttgctctgttaatctctctgtatatgtgtatcatctccatatccagccatcatcctcctaaacagctctcatatgttcacctctctatcccaccactgctagcccgccaaaggattccagcatctcttgtgagactactgtagtggtccttaactggtttcttcatgagtctctagcctccttcaatcctttatctgtcttatagtcagataaatcttttcaaaactctgagcaaactcctttacttggcctcataggctctgcatagtccagttcaacctctttagttttacattgtgccgcactgctctgtgcttcaaccacattgatctgttttattccctgttccctcctgcacaggaccttgccatgtgctattcgcttttcatattcctctttatctagtcagacttacttcctcttcagattgcagctcactttttcagggtatccttctctggcttccacatccaggtcaaactcaccgattagaaggccttttgacatcacatctattgcatgtttgaatgaataacgtaatgcccagtgttggatcagtatcattcgctactaaggaggtttgattatgctctgttttctgtacattttggatgttggaggtaacaaggaggatatgaatcagactcacggtagacagctagactgccagcctagcggtaatctttgtttcactggaaaattctatattgcagttagatgatgcaagtccttcccgacaggtttgtgacccagtaagttatgaagctgggaattccagacaacttaataagccgtgataccacagtgaactagaaaatatccagaaaggcgtatagagtattgctcaatgaatgaatgaagagagaaagaggaagcctgtgtattaggaggacttaaggctgaaattattgctcaaactttataaaattatgaagtctttacgtatagatgttaagactcaaaaaatgaattttttttttttttgagacgtagtgtcactctgttgcccaagctggaatgcagtgcagtggtgcgatctcggctcaccgtaacctccacctcctgggttcaaacgattatttctcctgcctcagcctcccaagtagctaggattacagaagtatgccaccatgtctggctaatttttatattgttgtagagacaggatctcaccatgttggccaggctggtctcaaactcttggcctcaagtgatccgcctgcattggcctccaaaagtgctgggattacaggcatgagccaccgctcctggcctcaaaaaactaatattgatggcaatgaacaaaatattaaacaggcttttttttttagggccaaaaagaagtaatttggctcttcacccaaattacttcaccctacaggctgaaggattcagatgaagtggagagtgaatcacttctgttaagaggcaaaggatgtcttgtatatgtattagttgcctatgactatataacaagttattctaaaacttagtagcttaaaacaataaacatttatctcggaatttttgagggtcagaaatctgtcattgcttaactgggtcctctggttttgggtctctcacaaagctgcagtcatctcacagttcacgtggggcacacccacttccaagccacccagtgacactggcaggattcagtttctgacaggtttttggactggagatctcagttccttgctgctgttggccagagtcttccctcagttgctcaccacttgggcctcttacacatggaaacttacacatggcaactggtttccatcagagtaggcaactgagagaagaagatggaagctagtctttttgtaacctattcttagcaatgacacccatcatttatgctgtatcctattcattagaatcgagttactaagtcaaggccatgctcaaggggaggagttttccacaaggggttgaattcagagggatggggatgactggggcaccaccttagaagctgcctttcacagggtgtcttcataggcttttgaaatggaccccagaaagggaatttgaggataaaattatttttgttactattagaaactcaatcagaaattgaatccttcctgatctgaatgcttacggttctaagcttactgctgccttgattgttttttgttggtttgtgtttttgtttttaattttaagggtcttgctgtgttgcccaggctggattcaaactcctgggctcaaacaatcctccagcttcagcctcccaagtagctgaggctacagttgcttgctaccatgcctggcaactcccttgattttttttaattgggagctgttttaaactaagccttttcatttctttgtcatttaaaataatactaaatggactttttaggtttccttttcaagtaggccctcaaagctaactttatagcttctttgctgtggggcttttgctgaaatgaaactgtacagacaagtctactactaatatgggctttgaaatgtcctctctgatgccagaaatcctactatttaaattaaaggagtaacttttccaaaagaattagtactgctgagtagattttatattaatctgcctaaaatttattcaaataatgaaaatgaatctgttttaagaaattcagtcttttagtttttaggacaactatgcaaaaatgtacgatggagaattctttttggataaactctaggttgaggaacttaatccaaccggagctattgtgaaggtcagaaaacaggagagggaatcttggcaaggaatggagacggagtttgcaaattgcagcttgagtaaatagttatgaatgggactgctattgtgtctcccaaggaaagttcctgtgatattatattccttttttaaggaaagagaaaatgcacagaaaacttttgctgtgcttcctttttctgtcctacctctgaaaataaactaagcaaaaaaaaaaaaaaaaaaaaaacacccttcccttggtgataggcttgtttagaaatattatcttcaaaggtctctttaggtaagccaagccattggctatattggtgagtctgggacagttatatatgtgccctggaaagaaaacaaaacacgggtgtgattccttttgtgtcagtgtttacaactcagataccaaaagaacaccttgttgattaaatcaagtctcaagctctggccttatctagtggtgagttagagaatcagatttgaaaggagaagtgcttcaaatgtttaagcaagtgaaagccatgagttgcttaacagtcaatattcatgattagtttaaaaaaaaaaagagaatcttctgactggggaatactttagagaatccagtggatttcctctgcatgcttggacctcactatccttattcctaggacatacccatggataagcaatgctaataagaacttggaatttccagggaaatatttttctttgttgctctacacacaaaatagtaatgaaatttttaagaattcctaattgcattttcaaaacataaatagttttcatgtttccactgtaactctccatttctcccttccctcccttgttctctccctggctctgacctcacctctgctttccacggggagcaagatgaactgcttggttgttccatgcggcagctggtggggcagagggtgcagtgagctgagagcagggaccccctcgcaagtctggcacctggttgaggggaaggcctgcttggggctgctttccaaccagcttgcctcaggagccctgtgccagcgaggctgagatcagggcctggcacatcccaatggcagggagagagtaacttgtgaggagcccagacttgtccagggtagcttggcagagttggagaggtggtcttaacagggtgatctccgtggcacaggaatagacgtgatcccagccagccctacctgccaacaagtagtgcttgtagttggggcctcagagaggtgttggtgctgagggccagctggcggtgaccagggattatgctgtggagctagaatggaaggaacacttattaaggatataaaggaaaaagctacaggacttggcgggggtctggatttgggcagcagaggaggacactgggaggtcagatgccctggggcagatcaaagcattgcttatctgactcagcaggacacatttcgtgttctctgtctgccaagcctaggcttgggcatatagtaggtggaaaaagttctttgtttttagtttcacatattgtactagctttggatgtatgttggacaggtgccaatcgggtatgttctgacagatgaaagtataacttttcagagtgctggtattttaaaatacaaataatcggtattaatcatctccagccaaagacaagttgagcaactgatatttgatcccaaagtttatatttgtttctcaggatcttcaaagttggaaacctgggagaggtttggaattttccatggttgcaaatgtactttactcacaaggattatcacacaagtgtctactcaccaggcacggtgctttaagcattcaacccacatggtctcgattctcacaaccactctgtgggaaggagcattatccccatttgatagatggaaaaaccaagtcttggaaaaacttaagtaatttattcagtgtcgcagccaacaggcgacagcaacagtattacaacctaggtctttctgacttcaaagactgtgcttaaaaactataacatactgtcccatttctttatttcttaatgtgttttgatcatgtcttccttgtaagtccaaaacatggtcttggtttttaggttctatatgggctagttctagttctagctcttgatcaataaattctcacttaagctttggtggaattagcacaatatagctatccattggctatatatggctatatattgttttattttcctttctctttttttttcctgtgaactgtttctattttgttttaactggtactattataagtagtttgttctgggaataatttatcttgtatttactttgtgttcttcctccctctttctccttctctcttttgctcattttaggctagctctttcttgctctctcttttttcaattaaaataaaatagagatgagatctcactatgttgcttaggctggtcttgaactcctggcctcaggcagtcctcccaccttggcctcccaaagtgctggaattacaggcatcagctactgtgccttaaagtattattaagaatttgtacttctctatgatgtagactttattctgttctcttcacccaagaaaattttggtgcatctttattcttggttaggcctccataccaccttcaattcatcaattatctttttggttttgccactattatgactggtttcaaagaatgcttggctttttgttgaaacatcaaaaggtatgagtagcaaacagcactgagatctcttccttcctgtgtgaacctccccaccggaagctgcctcatgctgtgatgcttaaaagtcataaaacggtatcattattcaaggcatagagtgactttagggaagctggtgggggagaacatttgtacaaggttgtcacagaatgatttctttgtgtcttccatttttagggtgatatagaatgtagagcgatcttccattgccttctcagtctgaacacctttgtttttctttaacagagtcaaatccccatttcatatatggggatactgaggctcagaaatttatctcacttatccatggtggagttagtggtagatttgggattaggataaaggtcttctgactgtttgacagtgctctttagttccatgagtctctatacaccatgttgagtagtaaaagtagaaagctcaaatgagtctctataaatcatgttgagtagtaaaagtagaaagctcaataaagaaaaaatataaacatgaatattaaacttatttggtagattcagttcaagtttgcttttggttaaatgctgcaaatggtttgggggaattagccattcatatgttcttgtccttgatctttcatttttgctgagaaacttgaacccattttggtgcaagaacaggaattcaggaattaacatttctagtcatttctgcactctgtactccgtcctacttggcttaatgtccctgggttgcttttttgtttgtttgttttttcccatcgtgtgatttgtaatacacagcttttcctgcccctggtatttctcaaggcaagagttgaggcagctatgtcatctgggagagtgacttagggcagtgatccccaaattcatttacacctgcatcaaggtcacttggatgcttgtgtgagtgcaggcttctgaggatcactcctgaccctataaggccatctctaaggacaacctccgcctcccaggttcaagcgattctcctgcctcagcctcccaagtagctggaatcacaggcatgcatcaccacacctggctgattttgtatttttagtagagacggggtttcaccatattggtcaggctggtcttgaactcccgacctcatgtgatccacccacctcagcctcccaaagtgctgggattacaggcataagccaccgcgtccggctgaggtctgccttttaacagagcactggagtacactattatgcacactgacatttgagatagcatctatggctgaggctgtctcagctctcagccttcccaccccagcttagaaaaaaggaacagaggataccccttcctctgggatgagaggggagagaggaaggatactaagagtcaccatctgctgaggtgaggagggtggaggcatgaaaaagcagtagtgcatcagccagggttggatagaaagcctgagtagttttgaagatccaattagtgttataaatgttctttgcagagccaataagcattttcatgtgaatttctccaacaagataaaagaatggggtaactatgcctagggattgacctgctggctctgaccaagtcataggtgttggggctcagacactgatgccccaaaatacagcattttgacattccaaactgaagaagcttcaaggtgtctctgacattcctgcatcccacattctctttcaaaggctttatctaccaaagatcgagacccaccaggggaaagaattgtttttccttcccctccctgtaagaccgggaatgtggccacacctgaacagaacctttcacaggatgacatacaggttaatctctgttccccatcccttttccttggtaatctcaaccaaattccttttctgcccccctcccataacctgttttgctgggatggtagttaagcttctgagtcacttgaggggtgggtaaacatgtgagtctacttgcgtacatgttaataaaacttatatgccttttctccaattgatcggccttttgtgagttgattttttcagagaaccttcagatggcaaaggggaggatttcctttggcctctgcatgggaaacagggactccagggtgttcatgagagtattgctgaaattgggttcttgaggtcccatctggccgaggagcctatgaagccaggatgggaaagatggagtggggtgaaatcaaggaaccacctacaatgagaataaagggcaggatctataagaataaggaagtggagaagtgagtaaatagaaaggctatagtccaagatttggaagccttgatcttacaggtggagtatttccaggtagtgataacgtgcaaggtgtggtgcctgtgtgtggttggagtgtagtggaggagtgttaccaaggtcatccaccttcttgaagccacccagcagaggcaggcctgggaggaaggcagcaattgtggcaagaaaggaaaagtcctggaggtcaagaaatgagtggcaaggttaggggtgagagggaagagtgaagccctgagaagtgaggtgatggacaggatgtggcctgggagaaacgtttatttgggaaagtgatgactatcctctctttgtcctgggagtcaaggaaatttggcaaacaaccacccctggagtgggtttatgaggggtgggattttgaagcaaaagccagcttttcattagacaagtaggtagagaaagtgtaaacaaaaagtgataatataggagaattacaacgggtcaggagttcagaggctcattggaaggagtgagtaggcttggggtatgtttaaggagggctggttagcaggatggagacagatgactttatatgagttctgggggggtcaggacttttactagagtttactaggaaaccaaatccactgcagaaacaggcatagatttatgtaactgtggtaggggcccattagagatcttgtgttactgatttactaattgtgctactgatttattactaattcattagctgtgacatacactttcagcaagtgactaaaaccttatgacccagagtaaaataattttatatcatgacccaggtagctgtgtgatatgtgtaataagtgggcgtgtgtgtctaactaaagattcaccgagcaacacttaacttctactatatgcaacagcctcttatgtttactattctgttctgttctaattcattttctaagaaaatgctggtcatgaaccactgtgttgattttatgatccgttaaaacattacaggtcaggcatggtggctataatcccaggactttgggaggccaagatgggtagattgcctcagcccaggagtttgagaccagcctgggcaacatggtgaaaccctgtctctgcacaaaatacaaaaaaaaaaattaaccaggcatggtggtgcacgcctgtagtttcagctacttgggaggctgaggtaggaggatcacctgagcctgggaggtagaggctgcagtgcacagtgatcacaccactgcactccatcctgtgtgaaagagtgataccctgtctcaaatcaaaacaaaataaaacattacagccgcatttgaataaagtgctttacactatcttgagcatgttttggtaatagttatgttctgcataacaatatcccataagattataatggggctgaaaaattcccaatcaaagcattactcacgtgtttgtggtgatgctggtataaacctactgtgctgccagtcatatgaaagtatagcgcatacaaatgtgtacagtacataatacttcataatggtaatacttatgttactgctttatgtatttactatgtttttatgttatttttagagtgaactttctctacttaaaataaaaagcaaattgtaaaatggccccaggcaggcccttttggaggcactggaggagaaggcattgttatcataggagataacagctccatgcagacctttcagtgggacaagatgtggaggtggaagacagtgatattgatgatcctgactcatgtgggatcttgctaatatgtgtgtttgtgtcttagtttatagcaaaaaagtttaaaaagtaaaaaaaaaaattaaaaagttaaaaatagaaaaaagcttatagaataaggacataaagggaaaaatatttttgtacagcagtaaaatgtatttgtgttaagctaatgagtcaaaaagttaaaattcaaaagtttataaagtaaaaaagttacagtaagctagggttaatttattattgaagaaagaacctttctttttctttttttgagatggagtttcgctcttgtcacccaggctggagtgcaatggtgtggtggctcacgcctgtaatcccagcactttgggaggccaaggcgggtggatcacctgaggccaagagtttgagaccagcctggccaacatggcaaaacccctatctctactaaaaatacaaaaattagccaggcgtggtggtgcatacctataatcccagctacttgggaggctgaggaaggagaatcacttgaacccaggaggtggaggttgcagtgagccgagatcgtgccactgcacttcagcctaggagacagtgagactccgcctcaagaaaaaaaataatttagcataccctaagtgtacgatgtttataaagtctacagtagtgtacggtaatgtcctagggcttcacattcactatcctaaaggacagtgacacaagtcctgtcctcaagtgatccgcccaccttggcctcccaaagtgttgggattacaggcgtgagccaggcgtggttgtgcgcacatgtaatcccagctacaggccgggccccctttttatgtttagatacacaaataccaccatgctacaactgcctacagtactgagtatagtcacatgctgtatgggtgtgtagcccaggagcaataggccatatatcctaggtgtgtagaaggctgtaccatctaggtttgtttaagtgcactctgtgatgtttgcgcaatgacggaatcacctaatgacatacttctcagaacacatttccctcattaagtgatacatgaccgcactaggtgctgcttcctaggcatctctgggaggaagaacattaattttaattttctgtacctagttcatacttggggtttattgtaccatctgggagaaaccaggaggtgtttagttaggcctttccctgctcacaactttcataggctccgttttccctgcaggatcatggaagggcacctcctgagcctggcccaggagcccatactcaccccttttacaccgcctccgccttcccgccatggttgatcgttctctcctcagttatgcctcaggtccctgtcctgcttccactgtgcatagtatgctttatggtagctttctccatgtgttgtcctctcttagcagtcagggagctccctgaggaagacattctcactcgctgtaccccactgccttgcacggggcctgtgcagaatgggtgctaggttgctttgcctgagtgagtgttgtgatctcagaagttctggcttaggcttcttgtccctgtgcttttgtctagagaggctttgtgagggacgctgattctgttggatagcctttgaatgattttcattctcaattgcatggatcgctttggggaacacagaccagctggctgtgcttggcagcaaggtgttgtgtggtggaaatggctgaattccacatatcctctgttactcacagacatttaggggagcacgtgccatccctctcacaattttgaatacataggaccgggtgctcctcacccttccatttcagtgggatagtttgtctagcagctgctctgtgctgatgacattatgaaatagggattttaaaggacctctgtgcaaatggagcccctcaacccctgacgatgtgttctgcacaaatagatttaagtaggctttttatgcatcagaactgcctgcaatctgaaacacaccaacaagacaggttcaaggatgaattaacaaaggttcagcagacttaaatgatattcagaagtcttgtggctaagtcaaattataaataaactcatgtgtgtggtgtagaactgtgtgtgtgtgttggttttgagagactgatagaaggaagaagtagatggagtattattttcttactcctgatgtgtctcccaggctggatgatgacaaagaacaaaggagaagttgtcaggctcagtcaaggagaagggaggagcgatatggtttaagtgtgggaggaagagaattgaagggacatttgtgccactttacgcacccacagagctgtttgtgtaggtgggggctgggcagggagtgtcaccagagactttgacttctctgcctcagaacttcactcagtggggtgtctgtgtgcctcagattaatgtcagcctgctcagggagaagcaaatatgtgtcctctgagggataaggcacatatttcacataccctctgttctggatggagctgagctcaagggactgggtggagaggaggtcctcttctctcaaacatggcccttctttctcgcagccatacttttgctaatcccctctctctggaatagttttcttattcctttctccctcaattatcattttactccttttaaagtctacctggtcttcatagatgaacccagagcttatcttttctctgcagatttcttggtcacccaaatagtggtaatttttcttctgaacgcccctagcacttactgtccatatcacttctgtgtcatgtataacagaatagcagatggaggaagctcagtgtttttgtgtctcatatacataggcaacttccatattattgttctgtatgttatcttgtctccccaaatacagccccaatgtgtcaattcttaccatgtctgctacagttcctaggggattttgcagggggaaagaagtgagttgtcatgtaaatgaaataatggtgtaccttgactgaggatgtgagagaattttttgtgcatccctgggcacacagctgtcttagtctcttgtgcccctataacagagtacctgagactgagtaacttataaagaacagaaatttgtttctcgcagttctggagactgaatgtccaagatcaaagtactggtgggtttggtgtcccataccagctggttatctgtttccaagatggcatcttgtagctgcatcctccgttggtggaagtgatggaaggaaggtcaataaggccctacctagttccctccagcccttttataaggtcactaatcccattcatgagagctctgccctcatgacttaatcatctcctaaaggatccacctcttaatgctatcacaatggtgatgaagtttcaacatatgaatttgggggcacacattcaggccatagcagcagccttatatgggaactgacaatattgtctctaccggggctgtcctctatatagaaatataacaggagccacatgtataattttaccttttctactagccacagtaaaaaagtagaaaaacaggtgaaataattttaatgtattttatttaacctagtatatcccaaacgtcattttaatacataatcaatgtacaaaaaaagtttttttttttttcgagatggagtctcgctctgttgctcaggctggagtgcagtggcacaatcttggctctctgaaacctctgcctcctgggttcaagcaattctccggctttagtctcctgagtagctgggattacaggagtgtgccaccacacccagctaattttttgtatttttagtagagacagggtttcaccattttggccaggcttgtcttgaactcctgacctcagatgatctgcctgcctcagcctcccaaagtgcagggattacaggcatgagccaccacacccgatccaatgtacaaaaatattaatgagatatgctactgtcctttattttatactaagtctttactaactgatgtgtattttacgcttacaggacactgcagctcagactagctgcacttcaagtgtttaatacttacatggggctagaagctgccatgttggagagaataggccctgcattcttgatccttagtctaacaggagcctcttagggatcttctgattattccaggaagaagcaagaaaggttacagggttgtgtttcatgtattaggaggcaaattaaagctttaagagaatagaaacagagaatttaccaatgaggtgcacttaacttttttctcccttagttttcttcccatattcacatttaccacagaaaggagaaacaggaaaaatttacaacagaaaggagaaactcaccaagtacttacgcaaatacaagtagcgcatgggatgcattctttttcttctgtcctgtgcacctgccttaccttttcccagggtgagtggatgatagcgtggcatctttgcaggaagagcttgtagagaagaaatggtgattccagccacctcagcctctgcttctgatagcctcttgctttgttcctgaagttaaataaccaaaatatatgcttataaagtggtgatgaaaaattacttcttggtcagtaggtgtctctgatggcagcaaatccatgttgcatttgtctttttctcttaataaaggacttgatggactgtgacaagattggccacctattttagagtcattggaattaaattaagacatgcccacactacctaatttcataagggtggtgctggagggagaagaggatagtacatacagaaggaagagggtggcccaatatcgacatgttaatacccaggactaaaaacaaagtctctactgttataaaggccaggaaggatgttctctttctacccaggcaaacactgtccaaattttatccacaggaaaatcaaggctcagttattcattgtgtacagctgcagaaacaatagaaaatatagccccttggttatcagagcagcattatccaaataaaattatcaggctcaatgtagccttgactgaaatgtgtggaggtaacatgctgcttttgttcttctcaaacaatgtatgaaccatagtcgatttatttttcctagtcctggttctgttagtgcctgagtggccttgagcaaagcactgtctctgtggctcaacttctgaatttatgaaatgggtccaggaacacctttcacacctatatcccagcattatgatgtgaaaagcagcctaaaaattaagcgctacattgctatgaattgtaaagtgtggaaacatggaataaaatacctcttaagctccattgtttattatgaaaaacattttcagtagtaggaacagctgtgaatcaggcagcccaacttaattagagtcaaagaatgtgcgccttcagctgctttttattgatagtgtttgcacgtttacttcctgaatagcataaatagaggtggagtaggtttatgcagggaagaataagtacattggaacaacctagaagtggaatcttccttctgtaaacaatattctcaataccagatacaggcccctctgttgtagcaccgggagagtaggagacctctttttaaacctagaagtatatgcatgtggttaattatacatttacaaggtaaagaaagcatccatcaaggaaatacttggagcaatattggcccagcaaattcagcttttaaatataattcgtattggaacaactggcatctccttcagaaagaaaaataaggtggtcaaaatgttgattctctaacctaccatcttggatagggctggatgttaagtcactggctcttacaggtgatgtgggcagcacgtagactgggtgttttcgagtcaagcacataaaaggctgcaggttttctcctggccacccggagcactgcagtaggacggcacctctcctgaaataaagctaatttaggctcacctcagctcccccatgggttgggatatgtgtgtgtctgctcttgctaagtgccagatttataattttgttctcttatgctagtcctgcagcctcttctttccatccccaccccatgccagccaagcagaattggggggatggggagaggactctaaacagacagctccttagcctctcagaggcccctgggaagagccacaggataggcaagggtcaagggaataatagcttttccttcttcctgagaagccttctagaattcccctaaagaactaggggacgcaatgtgaatcaaatagagaagccttcctgacttcaggatgttagggatacacattttttgagggcggagactctcattgttcatttttttttttcctgtccagcaggttctcggtgtggtggttaaaatgacttccagcttgggccccagacatttctttggaagaatcttgctttaaaacctaaatttaagctaagccccatagaaagagcaaacgaaacttcaaagaactcaaaatagagcatgtaatttcatgtgttgtgaaggcttatgaggaaagtggctttagtcaggtgtcaacaccttctcagggttacaaggaataacctagtccagctgccattgcagatgtgggggcgcaggttgtgacaggtggcccctcaggtggggagggctgtcttagtgctagctggtctccacttgtctgttctgcttcccacttgagagtactgtgttcattcctcctttatggggtgttcccccatcatgtttttaagtgtcagaatgttgggcagagggttcttttctgcatcatcctataaagcaatcactaaatatatcgggctatgaagcacttttcctttaaaaaaaatttttttttctttagaaacggggtctttatgtaacaaacctgcacgttgtgcacatgtaccctagaactgaaagtataataaaaaaattaaaaaaagaaacggggttttgctctgtcaccaaggctggagtgcagtggctcaatcattaatcactgcagctttgacctcctggactcaagcagtcctcccacttcagcctccaaaagcactgggattacaggtggcctcatttctctctctctctctctttttgttattgttgttattgttgttgttgagacggggtctcactctgtcacccaggctggagtgcagtggcatgatcacgactcattgcagacctgacctgggctgaagggatcctccggcctcagccttgtgagtagctgggactacaggtgtatgccaccatgcctggctatgcttttaattttttgaagcaacagagtcttcctgtgttgcccagtctggtctccagctcctaagcaatcctctgacttggcctcccaaagtgctgggaggtgtgagctatggtgtccagccttcttttttcaaaatcattttcatacctgctttccctataacacctcgaggtagggtgcgaatgggcacagagggaagagagctgagcctatatccagagcccaggccagaacccaattctctggatgaccatgcttcttcggtaagtatatttttgtggaatatttggagctcttttgacacataaagatttactaaacaacatattcacatatggcaaaatattatctataaatagcttcaaaatgtctttgctttagttttaggttctgatttgctgtggtgtagtgaggacagaatttttcttttgctgtattttaattgcaatagcgagtaaacaaaccttttttccccccttggttatacttttctttggtttccttggagttttccttggttacattgaaaaccacccagtatttgcatttgcatgggttagttcttaaagtcctaagtgggtcctagtgtttggaggttttgtagaaatcatatctttgtgtagtacaggccacacatggggagttgaatgtccatgtagtcattggagaagtggccagagttgggtgtcagagctgctgtttggacttggacagatcctgagtgtgtcatccttggccaggcactcattctgtacagccccccaggtgtggctctagggagagagcaggtatgcactgctgggtctgtcctgttctctgtagcttctggatgggaggaagggtgaccttttccaattgtattttatatatttgacatatttcaagtacattttaactttgagtcttaattttatttttttccacagctttagtaggaagattttcaatgacttcctcagcacatacaatttttctggttttaatttttgtaaaaacttgatccttgatgtttagattcacctttttctccccttaaaaatccagccaagggccaattaatgatagttgctatggtaactttggtgaaattcagaatgttcctaatgcaaagagcaatatgcttgaacagtagatttcatttaaaatgtagaagaagaatttgctttggtataaaggtgttcagctgaaccttcatgaagaaagttgccaaggactgaaagtgcaaaaggttatagtttgaaaagcttatcatgggaatttttagccatcttttaaataaataaatctcatttggttgcagcatgtttgccctgtacataaataaagcttagattttgtttgggtctccaaaacatggatttaaaattctgcccagttttatgtcccctcatcaaatgattttaccatgtattagattataatgttagtgatgtttctggcttatattaatatactgctttatgttgaaataaactcattttcatcctcaacacataaatttcatcaatttcagaccttaagcacggttatcaacctgttagatgcttctatttgactttgcttaaatagcgctgaaggcctgtcagatgactagggggaagtttttcctaaacaaattcaagttattttgccaattcagtgattttttttttaaaaaaggatttctttaataaaatgaatgttatcacacccttaaaagtgacaacacccatgtaaaagaagctgattgtatatctaaatatcataaaaaagatcattgaatttaaacttcttcagagttttgttttgttttgttttgtttgacactgtagccaccattacaagctcagttataagtaataagtgaactgtttctcatttattttcctttttatatctgtcctaggcacattttcttacctaggagtttactaatcatttaacctgaggactatctagaatatatgatgtttaatattttagtcacctgcatttatcataactgagcatttgatccatgccaaacactgttttaagcacaatagtgtttttttaatgtaatatataatagtgacatttttacacactttgattgctgtgtaaatgtttattggtatttctttctttcttttttttttttttgagatggaggcttgctctgtcacccaggctggagtgcagtggcacaatctcagctcgctgcaacctccgcctcccaggttcaagcagttttcctgcctcaacctcctgagtagctgggattacaggtgcccaccaccacgcccagctaatttttggatttttagtcgagacagggtttcaccatgttggccaggctggtctcaaactcctgaccttgtgatctgcccaccttggcttcccaaagtgctgggattacaggcgtgagccaccgcgtctattggtactccatattgtcagtttgaatggggggatgtggatgcggatcttacacttaggatcactgtaagaaaaaagtttatctttatagtattatttattaattgaagttggcttttatttgtacattggtatgcaaattcaagtttgtagatgttgcaaagtggatattggagtctagccattctaacacttcatcataaggcagcttccctcctccacttcaccacccctccaggcagatctgcatgcagtggtgctcaggcacatgtatgtgcttttttttatgcagcgaggttagagaatggggggcagggtcttttcctacatggggtaggggtgcattggccagacactgcatctgtctgttctccactctgtcctggcacagctcacctccagaacacagagcccaaagctgtcctgaagcagtgggtcagaaaacatgtttgaatactcagacacatggaatatgtccagtccttttcaaaattcaaaatggtagaaccatattgggaagccatgactggggacaaggaataagctttatcaggccctagtcagaaaggagtttagggctgactggagttgtaggacatgggagcctatcctcacatctggggatcaccccttgccgttcatgtgaccttgaatgatcactgagcctctcatctgtggttttcttggggaatgataccaagtcataggactgctgtgagcactggatgtaataatggatacaaaaactgttttagcagtgagcacagtttccttgggacttggtaactgatagctgtcaattcctaatcctcatttaaattattataaatgtgaggtgaagggaaggagaaattcttgttagtgagaaattagcttactctttggcatcaaagtgtgacatttgtctgtggtatctgttaatcaagttctattgatcaagctaaggtcagatccttctcttatagattaaatattctttttttaaaaaaattattggttgtttttttcttggttttcagtttataatgaatgcctatcttttaagattgacctaggggagcagtgtaggataaaatatcaagttccctgcgaaagattctgtgcttctgaataacaataaactacaaggtcaactttctagaataaaattcttctgatctaaaaacatatccatttggggaaaggtcagagaaactgagattcaataattcatcttttgagggttcatcttgtttatgcgagtcatttctttgaacagtttgatcaggttttgcttcagtaagggaggtacgaagatacaaggtacgtgttgcctcaaggagagaggttgtaggtttgccctttccctgtaatggccggactaatccaccagcttatattaggaagattagccatctgttagcttctaaaacagaggcaaaagtttctgctttcagattctcttggtgtgcgggcttgggaaggacagatgggagctaataaatatcataccttgaaaggccaagcacccggctgagttgtcctatccactgttaagtccagcccccacagcagtcctgtgatgtaggtgttgttcctcccttcaggtaggaggttcagtaatcattcagggtcacacgactggaaaaggctgaccccagatgtaaagccaggctcccagctccttgttcttccactgtgttctaaactccttcccagcttgcgcttgacacagccttgtcttctctccctccgtgcctcgcagtggtagggttccatggaacacgcaggtgaacagtttgacctatggatgagccgatctggagagcctgcctggtgggagcaggttggtccctgcagtccagagtctgcacacagtccttccagtgagtgtctctggaggctgtatctcctgattacaactctatagttttgtctactagagctgacacctttgttttctgtcacttctcaggccaagaagtaactttttttaggaaaatatctttttccagtaaagatgtcctttcatctcgccaccccacccccatccctgacctcttctacatgcagtcttttttgtttttgttgtttgtttgtttgttttttagatggagtctcgctctgtcccccaggctggagtgcagtggcacaatctcggctcattgcaacctccgcctcccaggttcaagcaattcttgtgcctcggcctcccaagtagctggggctacaggtgcacacctccatgccaggctaactcttttggatttttttagtagagatggggtttcaccattgttggccaggctggtctacaacacctgacctcacgtgatccatccgccttggcctcccaaagtgctgggattacaggcgtgagtcaccatgtccagcccacatacacttttaaaaataatagtttatcttgataaaatctgaattaagctgttgtttttatgaggattgtttctgactcctgtttctcatttcccttttcacctcccctgtcagacacatacactccacgtccacaccacacatatgcacactgcggacttcaccactcacattcactttactttgttaatctggctgcaaggaaatttcttagcccttgacacagtatgtgaagagagttctgttggcagctcaccatggtatttcaaatgtgtgcctcaaattgagagtgccggttggaaataacaattcactctaagcagtgcttttcattgaaatgtaaattgccttatacccgttttcattcttgcggacttctcaggaggaagacaggttttatgttacaagcattgaagagaaaatctttctcctggtatctctttttttagtatgcaacaagattgaggatgattcatttaggcaactctggtctactctaggagcttgcatatctaacaatatgcagtattctcaggaattttaccagtgtgggattgctggtactttgaggggagaaggataacttcatatctggatttaatttctgagttaataaaccgccatcaccctggaatgcccatttttatttgtttccttatccatttatgaactaccttaaggcatttatcaaatagtgacttaaatctaaaaataaaattaatgtcctttgtttggaatgcttttagagaccattaggacttaggagcagtgcagtggatgtggagagaatgaaagattcaacaataactatataaaaccctaaggtcccactcaagtggggcggcctggccaaaatgtagctcaaaacataatagtggctatgagaaaaaagctattttgttgtcattgttataacacccagcaaggaactgtataggttatagggccttttaaaatttttcagctggataccactttatttttattgtgactttcaaacacgaaaataccattatgttaaaaaaaaatactatggaatctgtgtggcagaatgtatttaagctgaacagattaaggctgtaggaccaaagggctgaacaaccttgagcatttttctttaaatattcaagtttaaaagcatattccttggcacccctaaaaggaaagcccagtaaaatgaatatgacatttagaatatgtagcattggagattttcatcttttttttttttttttttttgagtccttgggtttatcagctggaaactttcatggcattattgcatctttacatagtaataaatgtgtcataattgacatgtgctttaaaatgctctcacttcctctacttcctggaagattgtttctgtcttgcatgttgtccttgctgtgttttatgatgtgtttgtataaacatgatgaaactattcatgttcttgttgatgcttctctgaatggttagcactggctctctgggtgtgttttgtttgctaaaccttgaaaaagtcttagtagatggaatacagtggaaagattaggaagatgcctttttccctcatacttcctttaattaaataatgtgaaaatatactgatttaatagatgtttctgtgagttgtgctaaatagaattggtaacagtgttacagttttatagggctttttatctgtttgagaggtatgcaggatttcttttttattattattttttattttttgtagagataagatttcactatattttccaggctggtctcaaactcttgggctcaagtgatcctcccacctcggcctcccaaagtgctgggattacaggcgtgagccaccgcacctggccgatatgcaggatttcttgatgtttctcatcttcccataacttttctcttttcctgacatgtgcttttagcctctgatagccgtcagcaaatacctggctcctgttggttgttcagtcctctttttctcttctctcacatacctaccaccctccaggcaaagcaagtaccctgtggttctctgcctaatttatatgtctcggaacatgctgctcccctcaccttaaatgccctgcataactcacaagactcttaggacctttgagttgtaccttcatctccagaagttctccctggcatttgttctgcacctcccatggctccacatgcccagagttactgatttgtctcctctcgattctcctggaacacccagtccacctttttttttggtttgctcacctgccatctcccatgtcatagaaaggctgcagtgagacacagccctgttcatgaccttagtaataacatcataagcaggttatcagtaaatgttgatcaactgtatgaatctgctgaggttgtgaaaagggattcggagaagtttgagatgcatttggccccagtagttcttacctagggtggggaaatcaggcatgtacctgaggaaggttgctgtgctgctaggcagaggagttgtgaagtgaaacagagcacagcatgcacctgtggactgctttcaggccatgttctctggagtgtgaggtgccggacggctcaggcctcctgtccctggaaggcagagtgggagcaagcatcttgctggtagcggtcagaggctaaagggaaaggtagcactgggatattgccttaagatgaataggatttccataagctggggtgaaggaacgaggaggagcacaaggaaaagattagcattgagaaggagcaaggtatttgggcaaaaggttggagcagagatttcctgttctggaattagcagtgggagggaaggaagaaaggaatcccagaagccagttacggagagccttgattgctaggctaaagatatttgggtgttatcctgacgtacagaagagtgtgtgaaggttttgtaactttgaagaaatgggagcaaacagtctagtgatgaaagcagaggaatactgggcagagaaggagacttttgcagtagtctaggcagggagcatcctgacccaagacacagtccgctcttcactcatcctacaaagtgagtcccatgtgccaggccatggagagtctgtgatgagtagtgtcccttgaggagaaaggggcatgaaaacaaaatcaccttagttgtcacgtttctagtgagaagattccaacctgaaggaaaatccataggaggtgataaggatgctggttgactgatatgcgtaccagcatagtcacaggatgtgcagatcgtggattgcagatctgggctttgttcacagtgaaacaaacaatgctgcctgtgctgctctagtcacttaaccggacatctccctgatgctgtcaacttcagtcccttttaactggtctcctgctgcttcccttgtccccacttgctctgttctcaacatggcagccagggtgatccatttaaatcttaagtcagatcgcgtcacttctcttccccacactcacggtggctctcgtcgcacccagagtaaaagccaaagtcctcatgaagatccacagggccccgcccgcccctcaccacccctctggcctcatctcctgctcagcccagccactctgagcacactggcctccttgctgttcctctcacccctataaagctccccaaggcccctccttccctgtgtgtctccatgtctgatttctcacctctttgaagtctgctgaagtgtcactgaccaccctatttacaattgtaacctgtcccccagccctaaccctggcccttctgacccctctgaccctgtcctaccttttgttgtcatgactgattaccttctgccatgatgtgtcatttgctgttgtttcttgtcagatcctccacactgctccccccaccccataggtggctctttttttggaattaattaatttagtgattttttttctttttatttggtaggctctttaaggcaggaatcagcttctgttttgtttaacgatgtgtctcaaatgtctagaacagtgcctggtacaaagaagaagctcagtcaatatttgtcgaatgatttgtaatttatttgctcttactagtacggcctagttaacttttccccactaccaagtggattttgtttatgagaaagaaaggttgatcctgtcacagcctaaattccaaatatagttgccccttggtatcctcggggaattggctccaggagcccccacagatgctccagtccatgctataatgtgatgtagtatttgcatataacctatgcacatcttcccatatatgctagatcatctctagattatttataatacctaatgtaatgtaaatgttatgtaaatagttgttctactgtgttgttctttaaatttgtattttttttattgttgtcttgttagttttgatctgcagttggttgaatccacagatgcagaacccacagatacgaagggccaggtgtatattttacctgttatttgttttcttcaaatgacgtattttctctttgaaattcttagagcagagttctataaaatgggcacaataattagaaaagaaaatttgaaagcgacttttcaaataaaagaaatgtggcaaaagggttcagtcacatattagaaacgatttgtaatctgcaaggctaaagtggaggataaaaatgttgtaaccagaggataaggtccactggttctctggcttgcatggtctgggtgcattccacttattcctaacaacagtgacaagttctccatcattattatcttgggggaatttcagatacccccacaattgtacatgccctcagcattctgttgcctcttaattcgagaactaaacacacacagcacaaaatgctaaataaaagcacatgatagaatacaagatggaaaagaataattcctaaaaggaccacaccgcagaaggtttttagttttttgttgttgttgttttttgttttgttttgttttgttttgttttggtcttgtcacctagcctgtttttttcctgtgcacacatgcatcattgacatacacatatacactcaaccctccttgtccctacctcctccccattaaagaaagctgttgaagaagattcaggaaatcagaacagagaacgtcgacatgtgcaaacctttggataacttttaattagctagcctgccatcttataagtaactttcaaaagtgaattgggacctttttaaattcccagctggaaagtttccatttagactgtgagggtgttttcttttcattacataacccatttgtcagtggaggcagtatctccctgcaggaggtaaacattggttcttagaaggcaaaaataaataaataaatacataaatacataaattttaaaaaccctatttaaatgtataaagcacagatatacatacctatatataaaagatatacaataaatagatatacaatatatctatgttataaaaatatcctcagggtgagtacagtaatgaaaatggttgagaagcactggttgaacccacactcagaggcaccagcctagagcacaaacggtctgctctgcatgttcatgcttttacgtggtgtttgatagtttaacagtgagctgtgtccaagggcatgagcctgttaggtaggacatggacttatcatgatcaatttggtctattaggcactttttggttagagggacagaattgctcaggtgactcagttcctggagggcagagggaaggccttgctgggctgccagggaccagctggcaggagtagagtctgggaaggagaagggtgtttgaaatgagtataaccatcatccctctcctcacaggaccattgtggggtagtgtgttaattcattcttgagtcactataaagaaatacctgaggctgagtaatgtataaagaaaagaggtctaatggcctcatggttctgcaggcaatgcaggaagcacggtgcttgcatctgcttctggagagggcctcagggaacttacaatcatggcggaaggtgaagaggtagcctgtgtaccacatggcaggagagggagagagaagggggaggtcccagctcaaacaaccagatcttgcatgaactacctgggtgagaactcacttatcaccaaggggatggcacaaagccattcttgagggatctgcctccatcatccaatcacctcccaccaggccccacctccaacaccgggaatcacatttcaacatgagatttggagaggacagacatccaaaccgtatcaggtagtgttgaggttgttgaggtaagtgtatacaaagctcttagcacagagtgaagctcagtgaacaaatggctcttcttatgaagagcagccctcagcggaggcatggcacttccttcaagagaaccaaacttggaaaccttgaattaggaagtgattactcactttacagggaatgactacggtaatgatatatttgctttctgttacctaaacttagcagcttacatatttatcatctaatggtttctttagctcagaaatgtgggcatagctttatgggtcctctacttagggtctctcaaggctgccttaaagtgttgactgggactgggttctcatctgtaggctcagctagaaaggcatctggttccttgctcatgtggcggtcagcaacactgtatttcctggggttgaaggattcataggagcttgcacttgaaagccagcaagaaaggagagtgagaaagacaaagcacaagtctgccagtaagacagagtctcatatgatgcaaggtaatcacaagagtacagtctgtcccccttgccatctactgttgggtagaggcaaatcacaggttctgtctgtactcagggagaggggcctacacgaaggtgtgaacattgttgggggatcatgcggagggagtctgtttgctacaaatggtattcatattcacatgtgtttcaaacagtagaggaaaacgtaccaaatatttttctttctttctgtctctttctttctttctttctttcttttctttctttctttctttctttctttctttctttctttctttctttctttctttctttctttctttctctttctttctttctctttctttctttctttttcttttctttcatttattttttgagatagagtcttgctctgttgcccaggctgcagtgcagtggcacgatctcagctcactgcaacctctgcctcctgtgttcaagcgattctcctgtctctgcctcctgagtagctgggattacaggcacatgccaccacacccagctaatttttgtatttttagtagagacagggttttaccgtgttggtcaggctggtcttgaactcctgacctcatgatccacccacctcagcctctcaaagtgctgggattacaggcatgagccactgcgcccggcccaaatctttctattagcaaaacatttggttgataaaaatattggcttatattttaataatactgattggaaagcaagataaaggcactttgtgctgcctgatattaactgttaacagccactaatgctgccttctgcggtttggagtttattgaggacacagccctcttctttgaaaacgtggctgtctgatatcttccaaccaagggagcttttcaggacctcaaaacttcttgctttgtaaggaataattgaaatatccctgcaaaggtgattttaaaaaaatcttttctaaaatgtaaaactttcttttattatttgtgcaatgtttataataagtactcatttcagtgaagataaccattgctttgtttcactcagattcattgtcaagctttaaactttcatttgttttctaaattgaaaaaagccatttttggattgttcttacactggcattcttaaatgagaagtttggcacttcgtattctctactgggctccccctccttacactagcttggagttatgctcagtcagctctcctctgtatgggagaatgttgaggaacaatgctgagaattatatgggtattgcaaacgacaaagtgagagtgctgttggagattacgataccacaatgcaaaacaatttaatggtttggaggtacatttgtaagatgacaaggaaggatgattgaccacacccttaaccaagggttaagaggccctgaagaatatttggaacctttttttctgctgtacacaggtgtactggccaccacctatggcccttgaagtggggagaggttggtgttttggtgattagactttgaaatattttatgattccatgtactcagcatatcctaagtttctggctcactgaaaaaacttagcaaggcattgttaagttatgggcttcttacagtttggaactcccggataaggaaaaaacaaacattctaactgtctcacaatagtaagagcaaaaagcctgtgcagtccccaccatggacattgtgattgtgcatgacatacatattcaaatttagaacggagagatgcttcagcattctcttggaccaattgtttttcagaatgcagggttgaataaacaagtatctacatatttccactcttctgaatgccacatatttgcataatgctggacttttcaatgtttttgtagttcttcttcattgaatgcatccaaattgtgggaatgtggcagatggtgttatatccatttgacagatgaggaaactgaggctcaataacttgacttgcctgaggtcatgtcacacttctgtagcagagacagaaacagagccaagccctcctcattccaaacctcaggcaggagctgtggtgaaaagcagggagtcggtttgcatcttggctctttcatatgccagcattgtgaccttgggctgttactgaacttcaaagcctcagttttctcctttgtgaaatagggagactcccttctcttagggtttttagggttaaatgaaaatttacaaccgtccctaaaccttgcaagcactcagtaaatggcagctactgatgtggtttatgttggttttggcatactgctatttgcacaactgggtgttagttgagcttacctggtgtatctccttaaggcccattggatctgagtatctggcattctaggcccataattcagaatcagtggaagagacaatgttgatacatctctgaggcttggttacctgggagctggcttgatgtctggggttctagatagtgcccccaacaggagagttgttacggggtgggatgaggggctttgcccgcaagaggatgaaaagaaaatagtagaaacaggagagtggcttttgggcaaactcttggatttgctgttcagacatattagcaattcgtttagtgaagaacagagcagggatgtgtgatgggcttccattactgtgacatcaaggatttgaattctgaccacctggcagggaatttgggttctaatttgccaccagtggagatagcacaattatgattgtcttaacacaagaagccgtctcccctaacctactctcaaaatctatctcaggtactaacgctgacacagatctgctgccataaacttggttgtcttttttgtgctggagagggtttcttctgaaatgtaagcacctgggctcactctttctgcccctctgtctttgaatcagacagcagctttacctcttggcctcttagcagatttattcttaagcaatattaaaagtattgttgcttcttgtccaaatctcctttccccattcagaaataaaacaactcccttaaaggggagagataccatcacctccctacttggggcctgagaggtgttgcagaaaataaaattctctgagctctttgggccaattgttccttagattttaataccttagcatgttgtctgtgcagttttttaaagcatggcatcacacacatacccagcagcatttgatgaaaggctccagtttcaaggtaagatagtagtgtcaagctgtgcaaaatggttagtcggcctactaactcaactctggagcaagctgcttaacctttttaagctacctgtaaaatgagaataagaagagctgcctcacagaattgttaccaagagaataggctcacagtaagaactcaattgttaatttccttaaaaaaaaatcctgctggggcctggtggctcatgcctgtgatcccaacactttgggaggccaaggcaagaggattgcttgagcccaggagttcaagaccagcctgggaagcatagtgaaacctcatccctaaaaaaaaaagacaaaaattaactgggtgtggtggcatgcacttgtagtcccagctacctgggaggctgagtcaggaagattgcttgagcgtgggaggttgaggttgcagggagctgtgattacaccattgtactccaacctaggtgacagagagagaccctgtctcaacaaaatgaatgaatgaataaataaataaaatctattgaaagggggaaaaaaagcctcgaagaactttatttactttcttctgttgcatgctaccacttcctgaaagaatagacatttcccaatctcccaagtaattaaaaatgaatgcagatactgatttagagtggctgcatttgttcattggtagaggtagggacctaagaaacggagatgttcttcccatagctagactgtgtggctaagcatagcattgctataacttaaaatttttttcttatccattgtaaaaagcttataaaatatagaaatgcataaaaaataaattccatttacagccttactctatagaagtagtaagacattttggtgtctttgctctttctttttaacttagatttgtgtgtgaaatagatcatgtctacgaaagtgcatggaacatatatgtatgaattaaggaatactaaatatacgggtaccactttccaatttaagagctagcacattgctagtctctatgagccccttttgtgcctggctcttccatttattattatttttttctagaatcaagttagttctgtttatgtagttttatattgtgtttttgttcctactgtatcataagtatttttcaataatgtcatcattttaggttgctttcttatctttagagctcaaggtaattacagatcatagaatagcctttccggtaccgtgccttatatactcatttaattttacaacatgctgtgagctgcagcagctccccattttacagatgtgaaacctacatttcagaatgtttaggtaaattgccttgatgacagagtatgccaaaggactgagattagagtccaagtctgtgtttccaaaacccttgccatttctaccatggacaggctgactttatggggctgtatgttggaggcaccgtgtacatttaaggaattgaccattaaatgtgatgatgacgttatgggaacttgcttaatgataaagtaggaacaaaaacacagtccgaaactacataaacagaaatatagtatttctgcctaattctaaacaagaataacacatgactaagttctagtttttaagtggtactggtgccagaaaattccagatgaaggcaagcttccacaaggaatgtggaaaaacaaaaataatttcttgaccaggttcagtgactcatgcttgtaatcctagccctttgggaagctgaggtgggggggcatcacttgagctcagaagttcaagaacagcctgggcaacatagtaagaacccccggctctatttttaattttaaaagaatattaaaaataataaactataaaggaaaataactttttgagaatcggaacagtattgcatgctctgcttttatttgaagagtctatagtgttgggttgtctggtgttcccccttatcctcccttaattcccccaccttcctcccaccccataccactatgaagtgaagtctgagcttttatgttctaagcagccctcctgctgcattttctttttccttttcttttttttttttttccttgagacagtttcactcttgtcacccaggctggagtgtaatggcacgatctcggctcactgcaacctccgcctcctgggttcaagtgattctcctgcctcagcctcccaagtagctgggattacaggcatgcaccaccacacctggctaattttgtgtttttcgtagaggcgggggtttcaccatgttggtccgggtggtctcgaactcctgacctcaggtgatccacccacctcggcctcccaaagtgctggtattacaggtgtgagccaccgctcctggcccctgctgcattttctacagttgtacagttgtgcatctgtgattgattgtgctacaacctgggaggaagccactctcctcctttgctttgcccatgaagacgtggccctgtaaagtctagaagaataaaatggttgctatggttgctgtggcagctacaatgccaagctgaaaagctgactagaaagtcgcctgcttatctttggaaagagaggggactccatttggcacagatacagttgctcattatattctgcaggtatagtcactgtggcatccttgggcacattctgcgaactcaaagatgtgtagagatttggaagatgaataaaaggctgtgtttgtttaggtggaagtatggctgttattaagtttagtgagatggtagtggttaacctcaccaaagtattcattaatataagcatcaccttcagctttgccacagtgttttttggggataggaaaattccctgcctgtgaccagtgaatagtaaaacactactgggattttttcaaatggccattaaatgccaacagccaccaccacttgctgagggacaataaaaggagtggaggaaggcagtcagtcactttgtgtatgtttgaattcttacactgtaggtgtccaacctaaatagtgctgtcattggttttagttcagttaatcatgcctgaattaaaatagatttttttaaaactgtgattgtgggaatagtgcaacataaaatagttttatgaggccctacttcatgtctaaagtgtaaaacaatttgtttcaaaagaagagaatttaaaaacattttctttatttttaatacagggtcttactctgttgcccaagctggagtccagtggtgcagtcatagcttgctgcagcctggaattcctgggctcaagtgatcctcccacctcagcctcccaagtagctgggactataggcatgcaccaccacagctggctatttttttttttttaattcttggtagagagagagggttctctttatgttgcccaggctagtcttgaactgccaggctcaagtgatcctccttgcttcagcctcccaaagtgctgtgattacaggcatgagacaccatgcccgacctccaaatattttcttatgataggttactcctggaagcaataaatatgatgtaaagctcagattgactttttaattatctttatttttaaattttgcttttaaatttccttttctttttcttttcttttctttttttttttttttttgagacggagtttggtcttgttgcccaggctggagtgcaatggtgcgatctcagctaactgcaacctccccctcccgggttcaagcaattctcctgcctcagcctcctgagtagctgggattacaggtgcctgccatcacacctggctaatttttcatatttttagtagagatggggtttcaccatgttggccaggctggtcacaaactcctgacttcaggcgatccacctgcctcagtgtcctaaagtgctgggattacaggcatcagccaccgctcctggctgctttttaattttctaattcatttatttttattgtggtatagattgagttttgttgtcataccttcctgtgtttgtggagtcttagaaaagaactctcaggttactttttttttaaaaattttatttattttttgatacagagtttcactcttctcacccaggctggagtgtagtggcatgatctcggctcactgcaatctccgcctcttgggttcaggtgattctcctgcctcagcctcccgagttagctgggatcacaggcatgcactaccatgcccagctaatttttgtatttttagtagagacagggtttcaccatgttggccaggctagtcttgaactcctgacctcaggtgatccacccacctcagcctcccaaagtgctgggattacaggtgtgagccaccgcacctgacctcagcttacttttcttttaggccagacagatattcatttgtggagtacagatattcttctgttggttggtgctgtttagcagtatctacctagaatcttgtgtctcacaagacttgaccagattgataggcacttttcaaatgccctgctaaagctgctgaatccctgaatgatcaaagctggcactgactttggcagcggccttgacttttagagcatagcgtgctaacaaagaggagcttgcttcctccaaacagtaatagggtaatgtccagggatcagtgagcgtgttcctttcacccagtactctgcaccttgcatctcttcagcctcctgccaccttctactgttcgacacctcttgtcctggtggtgagggagcaggcagagtctttggatacagctcagctaagtggcttcaaagtcaggcaggggaactggtagctgagcctccattgcctggggttatctacttgtaaggtttttctgccttcctaattcttattactactattttactgccactctccctccatttgtgttactctgtataaccaacacctaagtgcgaaagtcctgggcttcagtctgtaccttctctatatggtatagatggatgcaggtgagatttcctgccaactcccaaatgtgtagctccagcccaggccacttccgtgagccccagatctgtgtgtgtgattgcaaactcaacattctccgccactgtgtactatttcaaactttaaatgtttaaatccaaactcattattttgtaaccctccctcctacctataagccttcccccgacaacaaaataacatatttggtctctttcacgtccttatcatgtgaaggacgctctcatccacttaactttgcaagctgggagttaataccgtaatctcttgctttccctctgtattcagtacattttatcagtttagattcttaaatctctgtccttaggcccagcatgatctagccctggcctcactcactagcctgatttccagctgtccctctctgccctgcttaggtggaccctcctccccttagaggccttacaccagcccccacttgctgaaatccaccccacctccccactgcccaccatcctcctgatttcatgttcaaaggtcatgtcctctggggaggcttcccttgatgctcaaatgaggtcagtgtctaggggggtaagctcttgtggcctgtatggcaccctcactagagtcttaagtcccacagcaataagggctttgtctttgcttacagtatatgctcagtgcctagggcagacccctcaccaggtgagcatttgacagatatttgtctagtgaaggaatgagcggatgaatgaatgagtgaatgaatgtcaggcactgtgccaagcaatttgtacacatctcatttaatccaggaaaccgtcgaaactgcaaatctcaactggggagtcaacccagagctgagccaacacccaagcccaggctctttctgctgctaccactggcttccttgagggagagacagttgctgctatttgattttactgataaaaatctgtgatgctacagggagaatggagcaggacttcttctagtagagaaattagggagacattgaggagacttgcattttaccgatgctaatttccttagggtcatttctttaagaaaaaaaaaatcctcttaagtaacaagcttggggagctgtagagctagatcagagattttgctgccaacctctaagtaacattccaagtccactttccactgcttcctgaggaggcctgtcagagttttgcaggtgtattcctgatctcctggcttggagctcttattcagtctgcttcagctcttcctctctactcttttggttcttgtctctttagaccatatttattcattcaagaaacttttacttagcacccattatgttctaggcactacgctggttgcccacctttattcctgttcctggtaagcatctccttaccattgcccctctgctcagcaacccccacacttttacaggaactatcattcattacgtaatgaggtcttgaacttatgatttaagttcaacattaattagacactttctgtgtagcagatactgtgctaggtttggaggtttaagaagagacacaccctgtgccttgaaatctgtttacactaccatcaaccacacaagaatgggcagatgaactagtgtgaagtcaggaagtatccatagttttctgtgatccacaaaagcactacagattttcaaacccctggacagctctgaggacttgatccattcgtaggtcaaacattgtacagaaagtaacccgagagagctacttgagggcaggacgaaggactgggctatttcccctctctctatcaccttcctcaccctcattctcataccctatctaagtactagttcttgccagtaagcttcttgcttccaatgtgtgaaaatgtaagcacttaatgggcaattcctaagtactactatctttttccctgaaagcagtggcatgaacttatctcaaagtttggaagttaatgggaaaaatattgaccaataggcacaaatctatgcatcttatttggatttgacataacagttaagacaactggactccaaaatagacagtaacagtgatctccagaatcaaaagtgaaaaggaaatattagagcatctacttttctaacttattgtctcaagaatttcttttttgctttatacaaaaatgtacataatattctggaactaacaagtgattatagcaagattgcaatgtaaagatgaatacataagtaaatcacattcctatatattagcaatgaacaagtagaatttgaaatgaaaacacaacacacttacatcaacacccccaaaaatgaaatactcaggtataagtctaacaaaacatgtacaagatctatgtgaggaaaactgcaaaactctgaaagaaataaaagaggaactataaatgcatgaagagatatttcatgttcacagataggaaccctccatgttgtcaagataccagttcttcccaacttgatctataggtccaaagcagtgccaatcaaaatcccagcaaataactctggatattgacaaactgactctaaagtttatagatagaggcaaagaccccgaatagccaatacaatattgaaggagaagaacaaagttggagaactgttgctatctaactttaagacttattataaatctacagcaatcaagacagtgtggtattggtgaaagaacagacaaatagatcaatggaacagaatagggatctcagaaatagacctacttaaatatagtcaactgatctttgacaaaggagcaaaggtgtgatacaaggcagaaaagataatttttttcaacgaatggtgctgaaacaactggaatccacatgcacaaaaatgaacccagacacagaccttacaaccttcacaaaaattaacataaaatgaacaagacctgaatgtaaaacacaaaactctaaaactcctagatatttattgtacatgttttgttagatttataatagaaaatctattatacatgactgtaggtttggcattgacgttatgtacaataccaaagacatgatctgtgaaagaaagaatcgataaactggacttaaattaaaattaaaaatttccgttctgtgaaaggccatgtcaagagaatgaaaagacaggccacagactgagagaaaatatttgcaaaaaagatatatctgataaaagactgtttttcaaaatatacaaataattcttaaaactaaacaataagaaaacaatctgattaaaaattgggccaatgggccaggcacggtggctcacgcctgtaattccagcactttgggaggctgaggcaggcggatcataaggtcaggagttcaagatcaacctgaccaacatggtgaaacccatctctactaaagatacaaaaattagctgggcgtggtgacacgcgcctgtagtcctagctactcaggaagctgaagcagaagaattgctcgaacctgggaggttgcagtgagccaagatcgcgccactgcaccccagcctgggtgatagagcgtgagactccttctcaaaaaaaaaaaaaaaaaaaaaaatgggccaaagatatgaacaggggctgggtgcagtggctcacacctgtaatcccagcactttgggaggctgaggcaggtggatcacttgaggtcaggagttcaagagcagcctgggcaacatggcaaaaccccatctcaactaaaaaaaatacaaaaattagctgggcatggtggcacatgactataatcccagctactcgggaggctgaggcatgagaattgctggaacccaggagagccgagatctcgccactgcactccagcctgggtgacagagccagactcccatctaaaaaaataaaaaagatatgaatggatacctcaccaaagaagatatacagatatacagatggcaaataagtatatgaaaagatgctcaatatcatatgccattagggaattacaaattaaaacagcaatgagatatcactatatacgtcttagaatggcctttatgatgggctggtacagagggtggcttccagaacccctctgaaaaccaaagatcaagtattagaatttaataaagatcagacccggtttggtggctcacccccataatcccagcactttgggaggcggaggcaagagaattgcttgagcccaggtgtttgaaaccagcctgggcaacatagtgagaccctgtctctggttttttttttgttttgttttgtttttttttttttaaagatcacgtgagaggcatacaaattcataggaaaaaatacgaaatggacaaagaacaggagtagccaattcacaaaaaagtaaaactaaaagcttccagcatgctcagttccacaaaatgacaaaaccatgcggtcccttttttctacctgttaatttagtaaaagcacaaatgcaagcatgcatacagcccctacatgtaccctctgttttaagtatcctgatcctctcggggaaataggtgtaccatgtaccatgctgatgacagtgtgctctgggggagcctttttggtaaacagtttggctgtatatatatgtgtgtgtgtgtgtgtgtgtgtgtgtgtatgtatgtatgtgtgtgcatgcttgcgtgtgtgtgtatatatatatttcatactttaatgtctgtctttaaactctgcttaagaaaaccatctcaagtgcagtaaatgccacatgtttatcatgacaccacttagtatagtgaagaatgggaaatcttaatctagccagccaatgggagtgttaggcagacttcacaaatgatgtgtagaaagactgaatagtaacactgaacaatgtttatgatcgtattgttgagtgagaaaagcaagactcaattgtaccttataaactctctcttttatagtacttgccaatttgttttttgtttgcaattccttgtcctttttttttttttgagacagagtctcactctgttgcccaggctggagtgtagtggtgcagtctcggctcactgcaagctccgcctcccggtttcacgccattcttctgcctcagcctcccgagtagactacaggtgcctgccaccatgcccggctaatttttttttgtatttttagtagagatggggtttcaccatgttagccaggatggcctcaatctcttgacctcgtgatcctcctgccttggcctcccaaagtgctgggattacaggtgtgagccactgtgcccagattccttgtcctttttaaactgtctttatgtctagacttgggagtatcctgagggcagagatgggtcataggacagaacatgagaaaagtatccgtagtacttttacccttagtagatagtcaccctcctggacctaagggtgtacctgtgggcagaatgaataataaaactttcttcccacccaacatttcctaagagctgctaatagttttccatatcttaaaattatgggaaacaatatttagagagctccttttcacactgaatagatttaaatgattaattttctttcttttttttttttttttgtttgttttttagttttttgagatagtctcactctgtcacccaggctggagtacagcagctcaatctcagctcactgtgaactccgcctcctggattcaagttattctcctgcctcggcctcctgagtagctgggattacaggcacccgccaccatgcccggctaatttttgtatttttggtagagatggagttttgccatgttggccaggctggtctcgaactcctgacctcagatgatccacccgcctcagcctcccaaaatgctggaattataggcatgagctactgtgcctggtcttaatttttatttttaaccttgttgaatgttattggatcattaagaaggttttccaatatagtattagcaactgcaataaagatgtgtctttcttgggggatgcagtgatgacggtgcagggcccatacaggcaggggtggcgcctgagggtcccgggccaggcagcagcacacaggtggcaggatccactcaggctgcatctcccgtggtgctcatctggctgctgccatctgtgctggaccccgccaaggtatagagtctcatggacacgatctggaaggacccagacagtgtgccatcgatgtcctctagatcagaggggcccagggaggtgactacttctactcctttggggactgccaccgctaaacagcctagcagcagctgcagccagactgccaagcttgtccatttcaccctctcggacctaagggtgtacctgggggcacccacaccagacttgcagtaaccacctccttggcacctgcccccacctccaagagcccagaagacacacctggcctccagcaggctgggccttccagaagggatagcagggatgcattctctttgcacctgtggggagggtctcactctgggcacccctctcaccagctgcaaggccttggactcatgctgaacagtgtgggagcctcagttccaacatctatgacagttggatcatggccttacccatgaagcattattgagagaatgaaaggagaacagagatgggcttgcagagccacatgctgctggctccacattcccaggaacaaggatcctactgcatttttgtctttatataaccctattatatggactacattctgccataaggaaaggaaaaccttggttgcgatggtttaaacaaacaagtttgtttttccacatagcatgaattccagagatgggtggctaatggtattggttcaacagctgtgtgatggtaggggtcacatctccgagatccttttgccttgccctcatttgcttgttacttcatggtcacaagatggctgccatgtctccaagaatcatgtctgtgatcaaggacaaaaggagtgggggaagaagaagggccaagctcgctggacctgtcaacttctatcaaaaagtaaaacttctgtcagaaacctgtttcctgctctctcctcctgcagattttcacttaggtgcccttggcctgagctagctaccactgcacctgtagctgtgaagaaagttaagacagtagggaacagagttgtattggttgagtagaccagtcatgttccatctactgagactggcacactgcctcctgaaataaaactggaatcccatttaaacaaaaaaaggaagtgtctttcttaaatgagtttttttttgttttgttttgttttgttttttttttttgagacggagtctcgctctgtcgcccaggctggagtgcagtggcgcgatctcggctcactgcaagctctgcctcccgggttcacaccattctcctgcctcagcctcccgagtagctgggactacaggcgcccgccactacgcccggctaattttttgtatttttagtagagacggggtttcaccgttttagccaggatggtctcgatctcctgacctcgtgatccgcccgcctcggcctcccaaagtgctgggattacaggcgtgagccaccgcgccaggccttaaatgagttttatacagacaattggcatatagtcctttcatcagtatccttaggtcaagattatattacattgcagattgtctccagggtactttggagatggattctaattcttattctcatattgcagtaacagggaaactgagagataggggtgtgtcagagtttgaaagacaaactatttgaagacagaaactctagtggagcttgattattagccaaaatacagaatttactattaaagaagagggtccagaatcctatcccaagaagttacttgggcatccaaaaacagatcgtaagacacattgaaagtgtggaactcagactttgtataaggcttttgtatcttgagaaggaaaatttaaaaccttaggaggattgggagcttcacgagttcatgatccttctctgcaccaagtttacacgtgctaacctttctgctttagtagctaaacttttgattccatgaaatcaaaaccttttaattgctttctctattggtgatctttaagagataacttgggcttattggtgtcagtctgtaaagaaaccaaactctgaagtgtgatactatctattgaattagacaggggaaaagctaattagtactatagtgagactggagtgcttctcagatgttacctagtggcaactgaggatgtggaagtttacagatttttagacagtctatcaaattacaattttcagaaaaaagtatttccaatgactgcaatgttttgcctctatcaactatatactatgtatgagtttttagaaatgttacttttggggctgggcgcggtggctcacgcctgtaatcccagcactttgggaggccgaggcaggcagatcacgaggtcagtagttcgagaccagcctggccaacatggcaaaaccccatctctaccaaaaatacaaaaatttgctgggcatgatggcgcacgcctgtaatcccagctactcaggaggctgaggcaggagaatcgcttgaacctagtaggtggaggttgcagtgagctgagattgtgccactgcactccagcctgggtgacagagtcagagtctgtctcaaaaagaaaaaaaaaaagaaaaaagaaaagaaatgttacttttgcactttcgtggccttggctagttttaaatgctttttcattggtagaaggcttacagagatcatgaaacattaatagttaccatttattgtgtactctttctgtgccaagtactgtgctaaatattttaggcatattatcacagtcagtccttacagcactcctttgaggaacatggcattttccccaaaatacatttttaagaacccttgagatttcaaagatcaagaccagagcaggaagggaaagctctgggtctgaaccaggtctgtctgccaccaaaacaccactcttgatagggatgatgatcttgaacagtggtaaaatctggcataattcaaacacttaaactagtttgcgtatatgtataaaattcctagaattccttataaaacacacttatgacattgaagttcagtaacttcccatgttccatataagccacagaaatattgatttgccacagtgaaagagttagtggaagctattgggccatccaaaagaagctaaggctgaaaaggctacatatggtatgattccaagtacatgacaccgtggaaaaggcaaaactacagagagtaaaaggatcagtggttgccaagggctaaggggagggagggatgaataggtggagcatggaggatttttaggaatgtgaaactattctggatgatactgtcatagtggattatacattcatcaaaatacagaatgtgcaacaccaacagtgagccatcacatgaactatggattatagttattaataacatatggatattggctcatccattgtaacaaatgctccacactaatgtaagacattaatgggcataggtgaggggctatacggaaatcctgtacttttcttttaattttcctgtaaacctaaaactgctcaaaagtctatttgttgcctttttttttttttttttttttttttttgagacggagtcttgctctgtcacccagggtggagtgcagtggcatgatgatctcagcttactgcaacctctgcttcctgggttcaagtgattctcctgcctcagcttcccgagtagatgggattacaggcacccatcaacacaaccggctaatttttgtatttttaatacagacggggtttcaccatgttggcctggctggtcttgaactcctgacctcaagtgatctactcaccttggccttccagagtgctaggattacaggcaggattcccttcatttttaaaattactgaccccaggccacaagacatcaatcatggtaaaaattccactgtccttgatggcacacttgatattttgctagctctgtggatgagcttttccttatctgttttctctctcccattccagctgccagcatgctagctgcttacgtttggtctacccactcccagcctgtcctacctcctgccatcagattaatcttcctgaaatggagtcctgagtctatcattcccctggggaaaaacctttgttcatgctactctccctcctcggtttctccatcacctgcatcacgtggtctgtcctctctgaaatctcgttagaagcagtcattgaaatcagaagtgacctctatcatagtatgttgtttgtagcttgttgacatttgttcagacactcttgcattaaacatcacgttgtacttgcctccccctccccctcagttggactgtaggttacctgatggttaagactaagactgttttccctccaccttggtttttgaatcacctggagtgcttttaatacagtgggtccttgaaaaatgcattcagctgaattcagtgtgtctgtgttctcagtctatccagagctctgctattaggtgaaatggaagagaaactcattgcctatatgactgttattgtgacgtacagtgcaatagctgatatgtttctgacattagaatgctctcatttattggtatttgatcactggcatattatatttgggatttgtagccctactttgactgctctactatgtattgaatgaagagtttagattggtattaatatgttttaaccagtacattttaaaccagtcaaacatctaaccacatgcaaaagaagggcacgtacttatcatgcttcttcacatgcttaccatgcttgttacatgacaaagggttgcctttacctatttttccttttagaagattgaaaatatttaaatgatgctgttgttttgatcactgttttacattctttgaagattgaggaatctggtgactattttatcaagcgatttttctcctggagttttcttttttaaccttttgtggcttaattccagtaaaagattttcaagtaagtgaaaatgagttgcatatatccattaagtctttttctttatcttaagtaaaaggggagatgaagtagaaatatttagcaactcagttattgcctctagcatttaagagttcagcttgaagaaaagtagttgacttgaaagaatatgacttaaggacagaggtgagaaggagataaagaagtgcatctataggaacaaatttgtttcttatttgctttaaaaattgtttaagtaaagcacatttcaccaagttgaatttcagcttgagagatgtccagatgtgaaacggcaaaactccaaatactgcatatactgtgcttttagaaaaataaagtagtttttttgttttgttttctttttattctttaaaaatgaaggtcaagaaaaatatcagcaggaaagtcagaagtggatttagatatataaatgtcctcattgaggaacaagggggtgatctttttttttttttttttttttttgagatagagtcttactctgttacccaggctggagtgcaatggcgagatcatggctcactgcagccttgacctcccaggctcaagcaattgttccacttcagcctcttgagtagctgggactatgcgtgtgccaccatgcctggataatgtttgtgttttttacagagacggggttttgccatgttgtccaggctgtctagaactccagggcttaagcaatcctcccgcctcagcctcccagagttctgagattacaggcatgagctactacacccagccagggatgatctttttaaaaggaagtatagtttaataataatatgcagaaaataggcttaagattttagttgactataaacttaatataaatctataatgtaatgtggttgcccgaaccattcttaaaatattaggttgtttcagtatgttttactgttttgaggaaagataagcatcctattaagatttcaggtggacatactttttaagcttttgtatttgtttcacttataaaaatcatcaagctataacaaaacttaagtcaacttgtgatgtttgccttccaacagtagctgatggcatatttttttcaagttcatactggattatagttgaattaaaagttatttcttaattctccaggataatagaaacattaattgttcagagaaactccaaatataaggaactttagagaaaagatgtgtttgagtatgtgcgtgtgttgggggagggggttgccggaatacatgatggaaacttgtctaaagaattctagtgctttaactagagcagaaaatagagcagaaaatagccacagatgttaactgacggttgaacatgtgtgaattggatctttgaaaatttacacatggattttctttgcaagttatgtgcttcacagagaagaaaggtatatgttcccttttgcatgtctgcttgctttccaaagactagctgctatcttaacttaaaaaattttatttttcatgccagaaaacattgtattttaaaaattgataaagacactccatttgtaagtacttgttttaaagtaatatatctagaaggcaagatagtggccccctttcctgtcaatgtggagttccaaagcagctgaaggtagaaattaacagtcggtaagagagctatcaaaagaaaaccaggagccagagaccaactactggtagtcagtagtaattctgattgtctactcaatctgccaaggaaaactaaatacattttttcccctgagtcaggttaacacttaaagtataaaaggaagtacattcaggatctcatatgccatagttcaaaatatttttttactttatatatcatcagatacatacgtgcacacacatgtaaatatgcatcatccatgggatgtgatctcagggagataagtaccaactcatatattccttttaaacccactcaccattgccccaatttttgttccttctaactgcattcaactcttcaattcataatcatacagattcatgcaaataacagtaacgtgtttacctggttttacattctaatgttctatttctagaactgcttaaaatgttaagtagcacgcattcctgtagtcttagttactcatgagtctgagttgggaggatcgcttgaggttgaggctgcagtgagctgtgaatgtgccactgcacactagcctgggtgacaaagtgagaccctgtttcaaaaaaaaaaaaaaaaaaagtaagtatataagaaagacactgtaaagcagaagtttttcatttcttgtaagttcaccagaggagttgggaattgggaagagagttgggtagcaacaactagaagttagatccatcgcatacgagtatgcgattgttgaattacatccttacctggaaaatgagctgttgtaagggttaaatgaaaacctatctaaagcacctattttagagtaggaactcactaagatggtagggctgctgcttttataaggggactgtattagtccattttcacgctgccgataaagacatacctgagactgggcaatttacgaaataaagacgtttattttattttatttattttttgagacaagagtcttgctctatcacccaggctggagtgcagtggcatgatctcagctcactgcaacctccgcctcctgggttcaagagattcttctgtctcagcctcccaagtagttgggaccaccaggcacgcaccaccatgcccaggtaatttttctgtatttttttagtagagacggggtttcaccatgttggccgggctggtctcaaactcctgaccttaggtgatctgctcacctcggcctcccaaagtgctggaattacaggtgtgagccaccacacccggcccaagaaagatatttaattggacttacagttccatgtggctggggaagcctcaagatcattgcagacggcaaggaggagcaagtcacattttacatggatggcagcaggcaaaaatagagagcttgtgcaggagaactcctctttttaaaaccatcagatctcgtgagacttattcattatcatgagaacagcacaggaaagacttgcccccatgattcaattacctccaaccagcccctcccacaacacgtgggaattcaagataagatttgggtggggacacagccaaaccatatcagggacataagtggaagaagggatataaatagagtttaggatttcaactttgatgtatgtaagtaatggcggttcttctgggtgctgcttggcagtaattgaacggaggttatttgcccaaagtttctttgaatttatcagctatttaccaaacactattgatggagttgacaggaccacaaaaaagactcacagcattttcatctgattcctagttttcaggagaaaaattaaagttctttgggagaactttaaaatgttacatttaaatatagttaataaaaaatggcttttgggtccagtgttaacgttagtaaattaatgtgattgagtttcaagtttttggcttgtgcatgcttaaaactttgtgagtcaagaaattcctattataaatttattatcttaaaaataagatctgctcccataccagagaagatgagacaatgagtctaccatcctaacaaacccaacacagatatgtttcaaatctttttccatctctttttattatttttttaagtttacatacatgaattcattttttggtgtaaaattgcacaagttttaacttatatattcctgtaatcaccaccaccacactaaggatactaaactgctacattattcctaaaagtagcccttgtgctacttctcagtaattaagcacaaccttcctctactccaaacccttggcaactactgatctatggttttactttttccagaatatcacatgaatggattcataaagcatgtaatcttttaagactggcagcctttattcaacgtagtgcatttgagatttatccatgttgtgtgtaatgatatgttcctttttattgctggatagtattgccttggagagagataccacagtttgtttggaggacatgtgggatgttttcagttattgctgattatgaatagagctgtcatagacattcgtatacagagttttgtgtgaatatagttttttatttctatgggataagtatctagcagtactgggtcatatggaagatgtatggttaactttataataaatgaacaaaccattttccaggatggccgtgccattttgcattcgtgccagcaatatatgtgagttctatttttttctgcaacttcctcacacttgatattaagctttttgttttagccattctaacagatatgtggtagtatctcagtgtagtttattgttttgcatttttctaatggctgattattttagctatttaaactcctttgacatttcatatagaagttttatttgctcatttggtaaactatctgctcaactcttttgcccattctttaaaattcggctttcttattgttgagttctgtgagttcttcgtatatttggattcaagttctttgttggatatataaaaagcaagtattttcttttagtgtgtagcttgtctttttactcttatcagaatctttcaaagagcaaaagtctttaatttcaataaagtccaatttatctttttttttttcattaatggtttgtgcttttggtgtcatatctaaaaactctttgcctaatccaaagccacagagattccctgggtgtttttttttcccaagagttttatgttttacatgtaggtctgtaacaatttcgggttaatttttatataagatgtaaggtataagttaaggggggttttttgcctgtggatttttaattatctcagcaccacttgttgaaaagactactccttctccattgaattgcctttatacctttgtcaaaaaccagttgaccatatttagtagagacggggtttctccatgttggtcaggctggtctcgaactcccgacctcaggagatctgcccgcctcagccttccaaagtgctgggattacaagcgtgagccaccgcgcccggcgcattatagtaagtcttaaaactgggtagtatgagtactctaacttttgttttttcaaaattattttagctatttaaattcctttgccattttcatgtataaagtttattattggcttgtctatcccttgaaaaaattctgctaggattttgattggaattgcattaaatctatagatcactttgagaagtgacaactgtgttagatcttcaagtccatgaacatcataggtctctcctctttttttttttttttttttttgaaacggagtctcactctgtcacgcaggctggagtgcagtgagtggcacgatctcggctcactgccgactccgcctcccaggttcaagcgattttccttcgtcagcctcccgagtggatgggattacaggcacacgccaccatgcccggctaattttttgtatttttagtagaggcgaggtttcaccatgctggccaggctggtctcaaattccttacctcatgttccacccgcctcagcctcccaaagtactgggattacaggcatgtgccaccacgcccggcctaggtctctccttttatctagattgtctctgacttctttcatcagtgttttatagtttttatctctctttaaagttgaagaatccattgattctgatgtttgggggttttttgtttgtttttttacctttcttcctaacagaaatgttttcagaatctgatttaagtttcttttactgcagtaggtacactagaaaacataattatttgtccagatctccatcttatttagtgttggacccaggccctcaatgacagaaggtcccctttaatagggcagtgactatgtgtaccaattccacgggtctagccagcttttcataagtgacaacagaccagagagcatacttacgtcactatttcctatttctctcatctttattttcagttacagtttctgtctttggggaaaagcaggcaaaatctaatttgtaatggatagaactagctgtccacttaaacaatagaaaactgagtcataaattctgtctttataaaactcctccatacttttggaaaatgactcacttttaggcagcgtctgccatagatatttgccagaaagtgatctaacttggataagcttgatgctttgtacaagtttcagagcccctgtagagaaagctcttaggaaccagagaccatcgtgtgcctgtctgtgtcccgtgactttcagtccatcaacacacgtcactgtagcattttggaatgttctggttcagttgctctcagatgttagctacttcagaaccacctggagggcttgttagaacacagatgattgtgtaccactcccagaatttctggttctatagatctgggataggtctgagaatttacattttgaataagttccaggcattactgaggctgctagtttggggcctgcttggagatcaattcctctaatttctgtgtttgtgtcattcaaaagaattgataattaaaaaaaaaaatgcaaccaacagaatctctataaaatcatatatgtttacaattaaatcattcttacaagtaatgagatggtatggatttgttctcaagttattggatggaaacagaaacttctccactaaggagccctgtccatagctgatgtgagagagaaaacaaagctgggccacattgctttctgccttcttcttttatgtaaccaggagggagcatatccctagaatttttttttttttttctaaaggcggagtgtttctctgtcgcccagtctggagtacagtggcgcaatctcggctcactgcaacctctgcctcccaagttcaaccaattctcctacctcagcctcctgagtagctgggattataggtgcctgccatcatgccctgctaatttttgtatttttagtagagatggagtttcgccatgttggccaggctggtcttgaactccagacctcaagtgatccacccacctcggcctcccaaagtgctgggattatgggcatgagccaccgcgcctggccatttaacagcttaaggttgggtctcaagtcctatttcttacctcaaggaaatgtacgatgtttatatttatttctttcatttaggcatgctaaattctgtatattgacagcagacttaacttgaatgcagaaaggagaattcagcagcactcaaaatgaatttacaacgtgacagtgtatgattcattctaaaatgcttaccattgactaaaagctttactcctatgtaccttgatagagcagagatagtatggtagagtagaaagatcaatcattaaccaaggaaatctgttctgtgtgccttggacactcaatacaagggccttggaagccacttactttgaatatcactttagtcaggaaattgaggagtttttggaatcgatctttttaagtttctttttggccttgagattttatgtttttatgtttctatttatttctgcctaagtaaatgaccccgttttctttcttaccaccatccatccccattacaaattacatgcctttttgtaaaagatcttaacctcagaaggagaggaaatgcaatcagcaaactcacaaattttctttcagtcttaattttcttttgccttttttttttttttttttttttctgtgaggcaaggtctcactctgctgcccaggctggaatgcagtggtgtgatcatggcttactgcagcctcaacctcccatgctcaagtgattctcccagttcagcctcccaagtaactgggaccaaaggcaggcaccaccacactctgctaatttaaaaaaaaaaaattttgtaagggggagagtctctctatgctgctggggctgttcttgaactcctaggctcaagcgatcctccctcttggcttcctaaattgctgggattacagccattgaaccaccacgaccagccttaattttcactgggaaagattattgaactgtatgctgtgttcattagcaatctcgccatatcaaatttttgctacctgggttgaaacagggaatttgcatgtctttctaaaatgcatgcgtttttgtctgcagatgtcaaataggcaaggcacagctgaataagacatggaaatgtagcttgttacaagtatagtgtgtggaggaatttctaatctctttctgtccaatcagctatgcagtaagagctcagttttcatcctctagccctgaatagaatgggggcatcatcagcaatctattctggagcatacatttttaaagtgctttgaagagaaaaattttcatctactaagtagtgaagaactcctgattaataatcgcatttcttttaatttgtttaaattgagatgattaggagaaaacaaagatgggggaaagattcaggattttagagagttattacatcctgattcgggtgattatccgtactctccacctcggacacactgtgagctttatttacgtacattttgaggcagacaagattagctagatcccaggtgtccattaccctgtgaccttttaccaatacaggtaagaaatcttaaactcaagcagaaacctgtacacagctgatctctttaggagtctataaatctggggcatgtgctgtgagatgtgtgcaagccttgttgggtcactctctgttaggagaaggccccccagttaaggcaaaggacaacccaacctattcccaaattgacctgtgtagcagaatcagctttggtcttaataatgcaaggaatcaaagagcctttggtgttgaatgaagtatgctataccttagccagaagcctcacttctgacctgtgcttgatatcctgtgtattgtgacttgattatccatacatttgacttttcaagactccctgaggctgggataattagaatagcctggtaaagccatttaagagttttttaaataacaatttagggactgtagtagggttcctgttgccactgttctccaacagcacccagcatttgagaatcagttagtaccgatccgatccagtgatatataagcaaaaattctgattgtgggaaaacagaagagaaggcagtgttggctgttcaagccacatgtctaggcataaatggggaggccatgatttctcactgcttttgacatgaaaccacaaagaatgtctttgttaagaatcaaaaaacataagagttgaacaagccaaaggaagaaatgatatcatggcctagttgaatcaactaagaaatatttttatgttaaagaaattctttaaccttataactagggcattcacattcttgagtatattgagtggaagattcctctgaaaagaaagttcacatcaatagcctttgaaagatttagggaatattttgcagtgtaagattcgttatttaaaatctgaaatatatttttccttcctacgactcttctatgtgtttatagtaacatcaagacaatgacatcctgcaattgcactagaatgtattacaaatgcatgccttgtgccaatgtattcaacaaggaagctatctttttcctctgtcttattttcattgaggaaacccatgcctatgcattatgcatgcgagtctggtgtggtgtttaagtaacctcccatgggactgccgtgagactgctgtgagtctggatttgggggagagctgtgtcttggcattttcaaatataagagaaggatgttacctgatactcagagaatcttggctgaagcttggcatccctctctggattagcttagtgttgtttcatgatactattttttgttttaaccagttgtgccattgtttgctgatggaaattgttacatgccagccggcaatgctagggtttcagataaatagaatatcagcatcattcttcatatcagcaaaatgataagttgtggttttgcccatcatacttaaagctaatttaggacttaaaatctggagccatgcaaatttataagaactgcttaataggagacagtgcattagttgatttagtggttgaatttccagtgaattttttttttttaattctgtgtagggacccattttaagataatctggaaaagaagagaaccagggaggaaaatacagtgtgaggcaggctgggtggcaaaatggaaagagaggtaggctttgggattaaataaagccagtagttctcatattttctgtatggcaagagctcctttagcaggctgaaagttctgtggaacccctctcagaatatttttaaatgcataaaataagctggactacaaagaaagccagttgtattgaaaagttaccaaaatatttaagaaaacacttatggcacagtagtatgtgcttttttactaacacacaaaataacaagttctagttgtgggacctaatgacttctatagttttgaaatggtgatgggcataaatgatatttcacaattggcaacaactgtgaagtgatataaaaatacaggtatttctgttggagacaaggtcatagatactgccaatatctggtgggtggtccatacattcataattgaaggaaaatgctaaattgtagaggctaatgcaaagtaaaatgtaattattttcctgtcccagtccccaaaacaagagcttgtggatctcagattaagatcccctgggttagaagaacttggctagaatattaacatagccttttactggctgtaccaccttaggcaagttaacctcaaaaagtctatttcctcatttataaaagcgttgatgagacctactttgtacagttgtggaaaggcataggaagatcatgcctagcctcactctttgtgtacaaatgatgacttgaagcacgttaggtcttctggccagatttcttttggcagtgatagaataaaatgacacttgctacacttgctgagaggtaggggcagactttatgctaggcagggaactcaaagattacactgaaagcagaaaactcctttacctttagattttcttaagagttgtcgacccttaaggagtgtcagaagtgggatataatatggagaaaagagaaagcattataaaatatgtggaaaggagtctattaggaaatttcctcctggccttgttgatccaaagcctttagttgcaaagaaacagctttttgttcattataaatgttttaacaataactagaactggtgttgccatccaccccatttgggcatgagcttttttcttccaccggagacgtaggtccccagatgattgattggctgcaaagtatggacatgtcttgattgtttctagaaggggcgggaccactgccttcttggattgtaactactacacctgcagagccccaaaaggtctggctactctattagattaaggtttaacatgtgataatagtctagttttattacttaaggggaaactcaaaagtgtggataccttgattttgtctggatattttattaagcacatgtacctataggccataaggatgtgttctttttctggctggccactgagtgtgtctgtgcatgatgctgggcagctcttcctttctccctgacagcttttaaaggcaggatactgagtgtttgatccatcatctcagtgagggtgtgaaatcagtgaggcaatggagcttcagggtttccttgtcccttgggtcatggctaacaccccatttaatgtctccttttcatcaaaaccagatttgtcgtctcacttatttcccagtgtctggccaagatagtgatctttatgaaaacaaactggaagtaatgcaagccagaaaagatgggagagcttcgcctctgcagaaggaagctgttaaggggaacagatggagacagggtctaaacagcttcaagaaagtgtgcacttgctagtctcagaggtgctccctgtcccccaagagctgtttgaatcaggagctgcttaaggacctgaatgacttctccaactctgccagggatccttcattagccctgcacttctgagatcactcagtgccccccatagacctctcctgctcttctgaatgcagaagcaggagtgggatataaagtgaaaatatagtaaattctaacctagtgtggcttgaaaaagaagttgcaatttatagagaattgccaaatatactgtgatggatcactaattttcaacatataataatttattaaaacactaaggatgacgtctataattgtcgtattaatctctgaaggtatcaggactttacaaggttcctgtgccttggccatcattgtgatcatttatagtgactaatcaatttgacaactatgtggcatatgaatggtaagcattcttggcaagcaaagggaagaaatgtcttatctgcatttaccagatctcatgtcttggctgtttgcagttatttacccctttcttccattaatctaaacttccaagaccctaagctcacattgtatcctgtattaacttgctaactaacctcctgtttttgtggttttctttctctgatctaatcagtccaatcagaagaaagattacacttacagatgcacatgctgatgtcatgacatcatcctcttatttaaggatctccctttgcttccctatcaagtctcaacttctctggccatctagacctcaggtgaggtccttttatcttagcgaccttgttctttgattcactgacatggatcttgggcgccattaagatggtttatttgttgtcagacaccctttgttcttttctgtcctttcactgtggaatttttctcttggccaaattctatccattcttggcccacactgccttcctagcattcttgtatccctctctcactgtctcgcctgcacaatttggtatatttggtttactattggtcttctgttatttcacatattacttgtttttccagcaagtcagagttccttaatagaaagtattctgctctattttatatattataattcttagcaaagcaccagcacacagtaagtgttcaataaatatttagaggaagcaggtaaaaggtgtcatgagttagatatttcaaataggaggagatggacccttgatggggtcaaccagcatcaagtgtgcctcttttacaaaaccaggaacccaatcttctccttttttcaaagttgatccaggcttatggaattcagttcataaaaaccaagctcaagggagtgaatgccaattcaataacaatgaaaagtctaacctctaggtaacagaaatatctgtgtcagccattcattgcatcctttttcttgtagcaaggcttccagcaggcgactctagggtcattcgtggccaatatgattcatttgcaccagctctgaagcctagtgcatgccatttagactctagggacaccttgcaaagttcttgctttttactttcaccccttcctcatagatgactctttgctttttaaaggaattgaagggctattctatagacaggagtaaagcctgttcagagatgttctaaacaccagattttgtttgcttgagaagcaaagagaagataatttagacaagggcaaaagcaccatgagaagactttgaaacagttttacccaagttgtaactggagaagaagacttgatgagtcttgtgaattaggcagatagcattcatgagctggagagaatgggaaatgcagagtgcaagggagattagttttgagggagcaggtggcagtgttgagtgatgctgaggggagatcagaatgttgaaagagaagtatgactgatatctggttagtttctttgttttgtctttcttgagctgctttcaccaatgatgtacatatgaaaaagggatgttatgaataagttaccttcaaactaaattaactgagtggtttttacatggagcttcaggatatccagaagcatatgtctaggaataaaaatggttatttttgagggctgggcgcagtggctcatgcctgtaatcccagcactttgggaggcaaaggtgggcagatcatgaggtcaggagttcgagatcagcctggccaacatggtgaaaccccatctctactaaaaatacaaaaattagcctggtgtagtggcgcacgcctgtaatcccagctagtcaagaggctgaggcgggagaattgcttgaacccgggaggcgaaggctgcagtgagccgagatcgcgccactgcacttcagcctgggtgacagaccaagactccctctcggaataataataataataataataataataataataataataataataatggttatttttaaagtaatatttaatgtgaaattcataagacttgaaattgggggaaattggaagagattaattcctgtcctttgactcattgtcctttaacacagattagtatttttgcaatcttagaattatgtatttatcaggggcttctttttcctgtggacagtgtcaaggggtgttttgaagtgacttgagcccaggaagtctgtttggataaacactgatggactgatgtagaacagtttatcatctctgagcaactggtaatcactcaaacacatgtaagaagctcagtggttgctttttgcaactatcaatcatgatggttgtgtaatgcaaataggagtaaagaaggtttgattagtctgtaacagcagctggcacattttttttgtaaggggctggatggttttgtgggctgtgtggactctgtccttatagtttgaaagcagccataggccataaacaaatgtgtgcagcagagtttgaataaaactttatagaaaatgaagtttgattttcatgtaaactaatgtgttatgctattcttttttaaaaactttccagccattaaaaaatctaaaaaatatccttgacccacaggctgtatgtgccaatccctggtacataacatagaataggatgagtttcgggaagaaacagtacaaaatacaggctgctatatgtttgcaatagtgtgaaaagaaagtttacccagcgttttcttggcaactgagacttcttgtaccattcattttcaaaagtcatttcaaaaccaggaattttttcctaatttctccaaactgattatatcagctttctaaaatatttggtgtgtaatcaaagtacagttttgttgctggatttcaaaggctgcagtttagtactaggtttctcctgtttcaaaagaaattgtgttatgtacataaatatgtacgtgcacatgcacacacaggagggctctttaacaatttgaagttcttctaatttcctttttgttcactactaagtgattctttattctccatgtgtcagtttatttccagatgtacatcttagttttcttctggtaaagtcctgtttcttcctgtccttgctgatagaggaaaccacataaagcatttcttaaaattaagaaaacaatgtcacttcagctgtgaatcctgtaaactttaagaatccattcagaatgcacttgaatgggaacattttgtaaagaaagctgaaaaatggcagtcagatttttacagaacagcccaaaggggtgttttgtgtgctaatgattagaacttttgcagattcttgcttagtaattaggactgacagatgggctctgtattagtccattttgtgctgctataacaaaacacccaagactaggtaatttgtaaggaacagaaatttatttctttcagttctggaggctgggagtttcaaatcaaagtaccaggaggttagggcccagtctctctgcttccaagatggtgccttaaatgctgcatcctctggaggagaacaccatgtcctcgggtggcagaggggcagaagagagagaacctactcctgcaagcttgcctttttaattttttaattttaatgtttttagagacagggtctctgctctgttgcccatgttggagtgcaatgacatgatcatagctcactgtaacttcaaacccctaggctcaagcaatccacgtgagtagctaggactacaagtgtgtgccaccatgcccagataatttttatttatttatttatttattttgagggacagggttttgctatgttgtccaggctagctcaagctcttttgatagcagcattaatctactcatgagggttgtaccgttatgacgtcaatacctcccattaggctgcacctcccaacactgctgcattggggattaagtttccaacatgcaaatttggaggacatattcagactatagaaggctctgttcctcggaacactgtctttttaaaaagaagtgcatttaattattcaaagaatacatgattatatttttgtcttttaaaataatatggataaattgaatttctcatttgaccctgtctcctccactcaatacttcttcccttcccagagataatgtcttagtctatccaggctgctataacaaaatgtcataaactgggtggcttagaaaccacagaaatttatttctcacaattcaggagactgggaagtccaagatcaagacattggtagattcggtatctggtgagggtctacttcctcatagatggctgtctgctcacgtaatctcacctggtggacagagccagggatctctctagtgccattcatgagggctccaccctcatggcctaatggcctcccacaggccatatctcctaatactgtcatattctgggttaagattttagcataggagtttgagggggacataagcattcagttcattgcgggcaaccattgctatcaatgttttgtaatcattttctgtgtgtttatgtaaataaatgttcatgaagtatgtttcctaatagaaaccatatgagaccaggcatgctggcgcatgtctatagtcccagatactcaagaggctgaattgcgagcattgcttgaggctaggagtttgagtccagtctgggtaacataacaagaccttatcattataagatgaaaaagaaaaaaaacccatatggatgttatatcctacagattataatgaaaattgcttttttttcctacttgatccatgttggagaacacaggtcagcatttttcttttgccatgctttcctgaggattgggtgggtgggggggtagaaggtgatagaaaaccctttgcatatgatatggtggtaagacagcctcctatcctgtaggcgtggtcaaggtttaaagctgactatctcatggggtgctcatgagggttcttcaaagactctgtcatctgtgtcagtttctgggagtctaggggtccaccaccagtcctgccactgtgatcatgttgccctttcagacagccctagaggactggacctgaaacaagccctggactggctcgttcttgtcggaggaccactccgtgcccttggaaacatcaggcactctttgccccaacacccacagcctctgagaggatggcccagacccactgcagcagcaatttcccttcactcccatgccaccagggcagctagccacactgcctctcatgttccaggtccccagagaaggggtgccagcacctctctgtgtctctttaatggtggagcactcaaatcaagcccccaactggcctcactgaaatccggcttgtgaagtaagaagctgatattcctactctttccccaatgggaagagggtgctgaatggggatctcagtgcagctctttccaaagaaatcctccctcacatcttgctcttgaccctccctgtgggagaggagcttaagcctagttcttagttatctcctttttgaagggcagatgggtgttttttttttaactcactttggtatctgatattgctagcatcttgtgttagagccaaaacttgcagtgtagcatcctcatcatgtgtatactagaaacttacttgtggaattgttggatgatagagggatggtgcagtagaatgttaaattactcaccgacggggtctcaggtacatgccacacgcttgccaacactttacaaaattgatctttaaatgtttttaccaggcttttgaaggaaaaagacacatatatctcaccattttacttttctttactaggcagttctttatatatttattgagcattttaatttttctttccatgaatttcctgttaaagtcctttgccctattatttatatatatatatttttttatttttttcttgagatggagtctcgctctgtcgcccaggcttgagtgcagtggcacgatcttggctcactgcaagctctgccccctgggttcatgccattctcctgcctcagcctcccgagtagctgggactacaggcacccaccacacctggctaattttttgtattttttagtagagacggggtttcaccgtgttagccaggatggtctcaatctcctgacctcatgatccgcctgcttcggcctcccaaagtgctgggattataggcgtgagccaccgcgcctggcttgccctattattttaaaaattgtctctatttattgatttgtaattctttatatattctgaatacgaaccctttgttacatagcaaatattttctcccagcttggccttgtcttttaactttgggaaattggactacatcaaaggcacgatgaataatgactttgtgttgtgtctggcttaaaaaggccatccttctccagggttataaacaccttctcctatatattcttctcatgctgtaatagttgacattttacagtgttttgagggttaatccatcagggatattttcatgaatagtagaactctaacttaattttttcccacatggagagctagttatttcaacactgtttgtggaaagccagtagcatggtgtgtggccactagaataagggtagtcaaagggctaaagtggctggagtggggagaatgacagataattgctaaacatcctactgatcaaggttagatgacttctcagtctagaagatacatacccttctgagaaagccccctgtaggagtgaacacccaacatcctttgaccggttttactatcagaacatttacatacaggcagaactaaaatctgtgattatctggatgagaaaacagttgtaggcaacttactcatttttctgaacaagaaaaggttctacataattacgttctctatgaatcttttatcagatttaatagttaagtctcttcaaagaacatgagatattctttttttaaagtgagcctatgatttatttatcctcattaatacttgttttccccaacccttccaagctgtttgggaatgttgtgtgtcagggatcagtgaaggtcatgaagatgcctttaaggcctgattaacctgatttgaaaaactttaaaactgaccttctctacatctccccattattgtcctacgtttcacagtcagatcaaggcttattatcctttccactggggaagtagcccaaatcatagtgtgagtgaaaaacatttactaagaagtgtgagtcttttaaaccctcttgtgtttcttttaagaaattaaaaccaataatgactatcagttgaatttggttgttccacctttattttatcaaaatccttggacatacattaaagtatttgtcccttgggcaggtgccaaggctatgaagttggagcgtggcatgttctagaagcagaaagaaggctggtgaggtagggacacagcaggtagggagtagagtgaggccaagccccaggtcagggctggacctcagggcctaggtccaggtgaaagcactgggcatgatgctgagggcagtagatgctgtgggaggattttaagcagggtgacaagatcaggcttgtactagatgagaacgttggctgtgtaaagatagattgacagtaagcaagagtgaatccagaaaaaaataatctagaaacctgttgcagtgatacaggtgagggatactttgcctttattggatttgaaagtataaaaaaaaaatgaacatctgttgtttagagtaaaagccctgtaaggtatggtataaaatgaaacattttcaaaaatgcccatgtcacaaaaaaattttttttaaatcagctctgtgcaggaccagctacctaatttgcagggccctcactgccaaatgaaaccgtgggacctcttgtgcaaaaataaaataatttcaagatggcaacagcagagcattcaacgaacatgggaccctgtgtgattgctatgcggcacgccctgggtctgtgtgacaaaatggcttgagtcagtccctgagaagcttctccttgcctgttccataaaaaggctgatgatgactcctgtggtctaggcagagaggtaaagataagctaagcttgtgtagctactactgttattttgtttgtttgtttgtttagactgcttcttgcagagcagggctaccctaccggcagtgcgcccagagtaacctgttctttaactcaaaggctttgttaaccttaatacaatgtaaattacagagaatgtcggaaacaaaactggcagcaggtatttatgactagaggaggtgagtagggatggtgatgggaattaagagaattgttttttgttcttattggctgtggttgatgaaaacataaactaggagaaggaaataacattaacattaaatttgttccttagaactatttatttctcctagcacgtacccatttacctggctttccaggagcatattctttttttttttttttttgagatggcagagttttgctcatgtcacctaggctggagtgaagtggcacaatctcggctcactgcaacctccacctcctgggttcaagcgattgtcctgcctcagcctcccaagtagctgggattacaggtgccagccaccacgtctggctaatttttttgtatttttagtagagacagggtttcatcatgttggccaggctgatctcaaactacagacctcaggtgatccacccacctcagcctcccaaagtgcggggatcacaggcgtgagctaccacgcctggcttccaggagcatattcttaaacagtttggagggaaaatggtttgggcaaaagacttcctgttaaattgtgtgctgctttctttttcttttttaaagaactggtaatacagccgggcacggtggctcacgcctgtaatcccagcactttgggaggccaaggtgggtggatcacctgaggtcaggagttcaagaccagcctgaccaacatggcaaaaccccatctctactaaaaatacaaaattagccaggtgtggtggtgcacgcctgtaatcccagctactctggaggctgaggcagggagaatcacctgaacccagaaggtgaaggttgtagtgagccaagattgtgccattgcactccagcttgggcaacaagagtgaaactccgtctccaaaaaaaaaaaaaaaaatttggtaagacatggcttttggctttttatctccttctccacttattttttacctgtggaaaatgattcagaaaccggacagagctttgcataagaggtgtaaattgtgaagttccttaactctgaaaattgaagacataaatatatagaattttcccttctagtatcactgagggaagaatagtggctgtgggaatttggtagtttgggatattctgaaattgtttgctgtcattttcatttgtaataagtttacttggcaagttctgtaccaaagctatcttgagggcaaagtttgtgaacaccttttaaaacacagtttacgtttctagaaaaaagatcttatgcttactaaacaaaattcctttcagcagttttcaatgactcagagccctgatatttgcatagtgattcggccaatggaagttgactttgagataattttggttaagataagtctcctggtttatgcttttaaaaggttaggttaataaaggcctgtccggaatagtataatgtgcagtggtttccagccacttttgattatctcaaatgccacctatagagctgggtagtaatagtgatattaaggtattatttcagagggacccacaaggccaactttggactcttgacattaaacactgcaaaattccaaagtgcagacagcttggcaagtttgagttctggtgcattctgttcacaactatttttttttttttttcaatagtgcttttgtctttctgctaaaggtcagactgtagttgtcgagtactggtattgttcctgaattattcgggaagagggtggaaatattgacttagtttttctattataatatcctatcacaatgctggattttaatgatttaaaaatgtaaataaaagtatttgcatttttagactacttgtgagcagctgccaattctaaaatcactatgggtgtttgcagctcttttctgggctcattttacccatctttgatcttctatcaacatgcaggtctgtgtgatgggctagaaccagcatgtattttgtttagagtcagactttgttggaatcctggtgtcacaatttggaccctcggggcagcacccagattaagtaacctctgtaatatgggggtgccaccactgctttgcagagctgttagataaagtaatgcatattgcctgctacaaagtagatgttgtatttgagtgtagaggaggggtgtatttgcccattctcatgatgctaataaagatatacctgagactgggtaatttataaagcaagaggtttaacagactcacagttccacatgcggctaggaaggcctcacaatcacggcagaggatgaaggaagagcaaaagtatttcttacatggcagcgggcaagagagaacttgttcaggggaactcctctttatcaatccatcagatctcgtgagacttatttgctgtcacgagaacagcacaagaaagacccgcctccatgatccaattaccttccactgggtcgctcccacgacatgtgggaattgtggaagtgacaattcaagatgagatttgggtggggacacagccaatccatatcaagggggggtaaggtttaagtgcagagccattgagtccaggctgctgccacgtactcttccagggcaatggaggtagtctgagtctgctccatggagagtggccatgagggacccagagctgacctctgcctgcctcaagccggattacaattctgttgggactgtttttcaactgcacccagctgatctagagagagtttataattgatgtgtgtttagctctgtgtcagcatcactggtttcttaaggagtctcactcaattcattggggctaaaaacatgaaatgggtttaactttctctaggcactgcttaccactgtgccctgttaaatccccccttccagtctctgaatggtggattgggcatcttctatcattctttcatctttccaaatctcctaatgttacatccagttcatcttctgtgcctctcctactctctcttctgagctctaggccctctgggatgctggggtggagaggagaggatggaaatggggagcaagggactagtaattatttaactcgccaagcggagttggtggtgagaaagtgcctctcgtagcctgctgcttttgtgtggtttgttctgatggtggggtgtctgctcaggtgatgtgtgactctcttggggctgtgtttggctttacctcagcctcgtttgtgagcagcctgtgcaaaggacagcagtgtccccctttggtattgctgggtgttcatgccccatcaggcttcaactcctccttctagtgagtgtcctggtgcttggcccatcagctgcctggcagcccaagggctcctgcccctctgacctcaacactccttcaaaaggaactgtgtgagttactgcagtcctgtctctctgtccaggggttgtagggaactgaactggagcgggaatattccagtcttctttcctggaacattcccttgaggctctgcttgcatgtggctccctcagtgggcctgccactcccgaatctctgactcaaaaatgggtaccagtctcatgctcatgggtgtgcccccactccagggactggatgccaagttccccctactccctgacatgctccgttctgctgcagtgccagcctggaagggagcgggaaactgtgaagtcttcagctcagccagcagtcagactaggagcaagatgctcatctctccttcttgcaggtatcctagtctctcctagtgattctcttggaagtcccccaacccctacctggttggggaagcagacagtaacctgcactagaaccttgccctccccataaagccaacatcaacctttctccttgtccttgcatgggaagaggggctgtggtcaggtagtaagactggtcctctgacctcctggggaagccatagggggcagtgtctgaccctacttgtttatggctttctgagtagggtacttagccctgttgtgctcagctttggccttggctgtattctaaaaataagggaaacagcccatttaacaatatcctttttaaggatattagtaatattctctttctgtagtgcccaggatgttcttcctgtgcatcctttcctgcagtagcagagtgagggcaggaccacactaatacttactggcatttgtgtcggatttgatcagtaggcttaaaatgtatttcaccttggaaaggtatggtaggggtctccatggacatcattttaattagctgcaggaattggaggttcaaagcgccccaagttttcttcagtttccccctcctgactctatgccagtgacttagaaatataaaggtgtgttctcttggatggattgtttgacttgctgcttcctcttcatattcacctaagaaatggacggtcaaaataaatggaaagtcttactttaaatagcagagttgatgattaggttcaggtaatctatttcattgttcatttattaagtagatacaagaaagaaaaaggaaaccactgggagggtatgagtgaaatggctagctctttttgggaaaagttaatctggtggcagagtatggaaactagatcatccaggggaagaggagttggaggtatggagcactagattataggtcagtgttcagaccagaggtcaaagggcctgaccacagtaagtggcagtggtagtgggaaggaggggatgaaatgagagagaggcacagagttgctggaagccaacaacggactggaatgagaacagggaatgactttgcagcattaatctgggatccatgaaaggagagggtaccatgaacagaagtaagggagttagaagaaaagaccaatttgagggtgcggaacatcagggctacccttggcctatagtgccttttcaagaaggaaaagatgttccctcctccaggcacaggacctggcctgtagcacacaggctggtctgggctaggttctggtgcacagtgtgccacctacacaaccatacatgatggccccggggaagattcctttagagcagcaaggttcccatggagtaagaaggcctcaacacttcatcaagggcatagccagactctaatgtcgaatgagtgatagtgcttattcctgtattgattgcagaaaaagccatcatgtaagaaaagcactccttttgacagacacctacctaatctacacatatcacagcttttcttttttttatcgtgatgaaatatatataatgtaaaatttaccattctaaccatttttaaatggacaatctagtggcattaagtacatttacaacattgtgcaacatcatcattctccatttccagaaatttttatcttgcaaagctgaaactctgttcccattaaaaataattccctattccccctcctcctagccccctggtaacctctattctactttctgcctctgtgatctgcctactttagatacctcatataagtggaatcatagaatatgtgtcctttggtgcccatctgactttttaacttagtgtcatgtcttcaagtttcatcgtgtggcatttatcagaattttattccttttcgtggccaaataactttgtattgtatggatatataccacattttgtttatctattcatctgttgctgggcacgtgagttgtttccatgttttggtgatcatgactgatgctgcagttaacatggggtgcaggtatatatttgagtctttgcttctaattctttggggatattataatacctatactggatcacaaagtaattctacgtttcactttttgaggagccaccaaactgttttccacagtggctgccccatcttacattcccactaacagttcataagtgtttcaacttctcatcatcctcaccatcatttgttattttctgtttctttaaaaccagtagccatcttaataaagtaatattgcattacagttttgatgtgcatttccctggtgtcccagttctacttttatatacctgcttgtcattaagaaagctctacttttcaagaatgctggaaagagcagctttcccccgctataaactcatagccaaccttcacttatatgagaacatgcagagcatagtttcatctcctttgaaatactgtaataagagttttagatgtatttgattcaacgtgcagaatgtttattttttgtgtgcgtgtatgtgtgtatgtgtttgagacagcgacttgttctgtcacccagactagcatgaagtggtgcaatcacagctcactgaaacctcaccctcttgggctgcagcaatgctcccacctcagccctctgagtaggtgggactatgggcatgcaacaccatgccatactaattaaaaaaaaaaattgatagagatggtgtcacactgctgggcacaagcagtcctcctgccttggcctcccaaagtgttgggattacaggcatgggccactgtgcccggccactatttttcagttagttgtgagcatttaaaaaaacagaagaactcataaaaaatctgaatcttccacttttcaagaaatcccaaaggtcaggcccttgtggtccacatttccacaagtagctgtgagctagagccaagttgcttacagcccccacccagccagcttcgttccttaccggtaccggcctcacccctgcaggtatctgtttccaagcccgccctgttagagtggattttctgaggctaaagttagtttggatttattccaacttatataaataatcgaggtgattagatatgactaatacttctgttctacctagctacttaatacctccactgacactttctttcctgataaaatctgaaatctcttcatttatccttgcatcccttgagccccttgagggacaggtcttatcaacagattggtttctactggttaaaagttgcattaaatttgtctcctcatacctggaacaattggatatcatgttttgcatctgcccatcaggtagatacacccttttagctctgccacattctaacatagagtggctcttctgtcattgccacctaattgtaggcctctgcttgctagttgtatccactgtttacgttatagagaaatcttttcacatatgtaaggactttatatctgtgtgtgtgcccattcatttaatagtctttgtatatgctagaattaaggcacaagaaatacaaatgtttcatgtctgtggtcaggaaatacagttagcaatggctgtagctgtttagattgtgaagatgataattggccgcttcagatcctgtgtcttacagataatcagtactggaaggtgtagggtgaagctgcgtcacagccatgaaatggaggcattgtgaaacccaagccggcccagaacaccctcgcagcatgatttgttattgcacagagctggctgtactgctgctcaagccatatttcctgaaactcaagaacgccagagtggaatagagttctcttataaccagctcctgttccctcaaaccttcgcatgacaccccttgtggttttcagcccgtctctctgtgtggtcgctaatgacttcattaaaggtgaagcatttcagtgatcaagagccagtgcttgatgatggttggagggacgtaaatgtgcaagcgggcctcagagcctaggtggaccggcctccttgccttcactctcaggcatcacggccctccagcatgtttctctgaggagctgttgatcatttgcccaggagatggagctgggaacctcgttgtcaccaagtcagtaccaatgatttgtgcttcctgtcagggaaacctgtggtgcatgtgtttgtcttctgcttctcagccagtttctttttgcatccatcaatctcttcttatctgtcttctttttcctgactgggcatagtagtcagttgtgagtttggacttgtattttcttattttgtaacagtttgtttcctggcttcatcttgcccctccctcctaaaagctccacttgtcttttatttctcaaggtagatgggacgaggttttttgttttttgtttttgtttttgttttgtcaggttgacttacatttccccccattagggtgtgccgcagaaagaagttttctctatttctgatgtctatgtcaatacagaacaataatgaaattgttaggcaggtgaaatggtacttaactatctgtctggaaactcctaagcgcctgcaagtctttctgagtgagaatttactgtggatagcagttaagatgccccattcctgaacatgctgtaggaatgggtcctggtaggcatcactttctagccagtccaaagccacgctttcctggcagcctgttcctctcatcatcttcctgttcccatggccatggcaccccaaatgtctgctgctctgaccaaaaagctggcagacagtaaataaactgacttctaagataagaaccttcatttgaaacaatttttaacatgccttctttgtcaaggagtaaagaccctgaatcccccaggggttcctacagcccacgatggttcacaagagagtctacaatcctcagagccaagaagcactgagactcaaggacagggccacttgacagagagagcagttcccagccgacttggggcctaggaggatattctgggtggcagggctctaattgattattaacctacatataaaatcaaggacatatagccaagcacagcagcaaatgctgccaccttgtgagctgcctgtggttgtgctgggtggagatggatctagctaaggcacaccaggatgcagcttagagagaacttggtcagatttttactgcttctggtataattggaacactttacttcttaagcctactgtgtaatgttatgtgtacagagtgagtggttgcttaattaagtgctttaattttttttggtcatatatacacgtggtgcaaaatgtaaaaggcccaaaggaggggacagtgaaaattatatctttctcccacccagttccccttcccaaaggtaaacattattgccagtttcttttgtagcctagtgggaataatttctgaatagttatccatactttataggtaactctatagcgatagaactatatgtagttctatacagtatgtatgtagttatatacagtacatatatatgtctacagtatatatgtagttatatacagtatatatgtatatatgtactatatgtaaatatatacatatgtagttgtatacagtacatatatacatatctatagttttcttctatatagttatctctacatatacatacatatatacacataactatgtatataaaactatacaattgttacactgttgtgtaacatggatgtgtatacaatagcgatatgattaaatatttcttattaatgatgatttcctgcagcctttcaatcttgttaaacacaaggaaaattagaaatggaccgaacagaagtggcatcataaaaggcagctactgtttgggagcaagggacatgccgtggagaggaaatgtgtggtggtctgaaattgcaccagtttccactacaattttaaaaccatgcctagccttgccaaaggacctcgggggcaaaggttaagccgacacaccctttaggtcatggtacacagtatctctgggcacatggtggactctggtttgtgctggacccctaaaagttatttccttttatccctggttccctccctcccataggcaacattctgatatgtatacaatgtatcatttagatttgtgtgtattcttgcaatggatcttgttttgtgtgtaagtatttttaatttatgcaaatggtatggctatctcattctgttccttagttttttttactaggctttgaaagttccatccattttactaggtgtgaatccacttcattgctatctgtctttgtagggccaaactgagatttggaaaatacttgaagcaatctttgtgactttttacccaggttttttcacatgttgacacacatgacaaaaagtgcatgtacttttgtgttactgttttactcactttactatttcaactttcctccattttgctaatttgtcataaatattaatggctgtatagtattccatttatataatcagttattacttcacactctctcctgtcatcagacatctgagttttttatttttaatatcattgtggttacatgcgtatcattggtctttgttgattttctttttcttaagccagaacagatgcccaatagggaattattgagccagagaaaaattctcctatagcatgtgatggaagtggccacattttacctcttgctttatttccagaaatgaacacaggtgtctatatccatttaatacacccctttttggccgggtgtgttggctcacacctgtaatcccagcactttgggaggccgaggtgggcagatcacttgaggtcgggagttcaaaaccagcctagccaacgtggtgaaaccccatctctactaaaaatacaaaaattggtcaggtgtggtggcgtgtgcctgtaatctcagctattccggaggctgaggcaggagaatcctcgaacctgggaggcagaggttgcagtgagctgagatcatgccacagcactccagcctgagggacagagtgggactccatttcaaaaaaacaaaacaatacaccactttttatttgtagtgcactatacttagagctgttgccataggaattgatataccaggcgtcatggtggtcagcagacaaataggaaactcctgttatgtcgtcagaatgagttgcagagagtaccatctgctacctgtattgtacatctttctgttcctctgtcacgcctggcacaagagcagcattggtttaatcatcagcagcccttctgctctctgtagtcaggattggcagtaactcattggtgggcaacactgccttggtcttgccgcttgcactgtgaactgtaactacggacacacatgtcaggaaagaatggtgcttgggatgctcctcctatctgtgcctcaaacgttttcactcgagggatattaaaaagtggcctactgcttataaagactgtgtgtcagtgaagaggaagaggtgggagtggagagtgggaggcatttgcaagaacatatgttggattctttttttctcttcttggtgacaatgattgacggcatctagtgagtccctgtttgtcacttccttggtacagctggtagtggaggtgggggaaatcaataagggctggacaaaggacatagctagaggaagaaagcactgcaaatatggtattaagatgacattcctcacagttgaatttttcactgtgctattacttcacactacctgctgcgagctattctcttttgatcctttaggctgtagaggaatcagtctgtgtaactctccctcattcaccacctccaagaaagggttaactttggacataagataactgtagtttaaggggaggaagagaaggaaggaaattcatactggatacagcttttgccagttttgtttcttctatgttgaaatatgggctggctttatggcattctcttggtgttctggaatgtccattatttaacaattccatattgaatacttgcttggggcttagaagagggaagtcaagtgtaggaaggagttgtggcaatttaagtaagtttacaatgatcttattaagcttgttgctttcattttcctgcctacgttggggcaaagacgtgttaaaagtgcaagaacagtgattattttgtggttagagcatgtgcacagtgtagacaaacccaggaaggagaatctgcttcatcaagtcttaagttgttatttagaccaaaatgtatgcgtaagcctcagatgactgttgatgtgccaggaaacttctgctgagtactttcggttctttcttctttactttacctctgcaccccagctcatggttatcttgtaaaactgaaggtgctttgcactgcaaacagacatgacagctcagtctcccctgtagcaagttctagggaaggcaggttggcagagtcccatttttgagctcagttctccaaggccctttggtcagcttattttcctgcagggtgtcacatcccacagtagtctccacctggaagacattggatctcatatgttcagatcagtgtagccacgctgctctgtggagaacagtgtgataaatccttggtagcattacgctttaaactggtggccacttgcctacctccttttaatttcattttgttaacaattgtttcttgaggacctgttgcatgctgggtgcttttttcctgggtgatttcacatttagcatctgttttcattctcatgacttctctgtgaggtagcaagtattgtacccagttttctgatagaggaaattgtggcccagagagattgttgtaccccaaagtaatgaagatgaatacagttgcagaaccaagttagaagccagatttttggagatccaaggtccagtgaacacagctgtacccccacagacacttccgaaagtgaccacagcctcttcagccagtcctgaagagtatgttcaccttcatctgtcttaaagcacaggcacacctggctttgggaaagcatagtttatcaagatctgaattggctcattttagttttagaaaaggtttcacctaaggcttctgcttaagaagagagcattcctaggaagtgagcttaagccctgttcaccctattaatcttaagtgatttgtcagagcagagtggcagagaggtgtcctgcagaggtgacaacctgaatttaaatcacagctcagccgcttactagctgtgtaatcttgagcaaattacttaactctctgagcctcttcttccttctctattaaaggggagtgatatcaatctcatcagattagtgtgagaatacattcatataagtgccaagtacctgctaagtgctagtccatgtgctaagtaaatgtgagctgcaattgtttgccattggcattatcagtagagtgggagtctcattatagcagaaacctggctctcctgaacatatgtaaatatttacatagcccctactaaatgccatttaagagtgtatctagtgtaaggcaataggatgtgtttagcaggaggagtggatttgttcagggggtgcaacagactgggatgggagaagaaggcatgtttgatagtcaaaatgctggcatacttcctgcgcaaggaagtctgtatggctaaacagtgctgaactaaacaaatactgctgaaggtcaggtgtgaacagtgaatcatattggcggggcatggtctgggatatggtggtgagcagtaaaaactacaatagctaccatgaaaggtacctactatatgccaggcactgttctagtgcttttctcctattagcccttggaagcagttctattattatcccattttgtagattaggaaacagactcagattaattcagttacccaaggggcacgtaactggtaagtggcagagctttggttcagtctcaggcgtcgagctctggagtgtgtgtgtgtgtgtgtgtgtgtgtgctttcaaccattgtgttagatgcctctcaagacagataaggtccttgctattgtagaattcacagtctaactgagtgagccagtcaaactaataagtattatatctagtctgccaggtagtaataaatgcagtgaagagaaaattgggtgaggaattttagaggatgatgggagttgatgttttagctagtgtattagtttgttcaggctgccataaacaaaataccacagattgggaggcttaaacaacagaaatttactttctcacagttttggaggctggaaatccaagagcaaggtgtcaatgtgtttggtttcttctgaggcctctgtcctcggctttgcagatggccctttcactatgtccttctgtcttccctctatgagcgttcagccctgggagctctctgtgccctgatcaccttttcttataaggacagtagccacacctaatcacctcattttaacttaaccatctctttaaaggccctgtcttcaaatacagtctcattttgaggtattaggggttaggacttcaacatataaatttggggaggggaacacagttctgaccataacactctgccctctgcacccccaaaattcatgtcctcctcacagcaaaatacattcacctgcattcaacaacctaagccttaacccattctagcatcaattctaagtcccaaatctcatctaaatatcatctacatcaaagtgagagagactcaagtatatgattcatcttgaggcaaaaattcttctccagctgtgaacccgtgaaaccagacaagttatttgcttccaaaatacaatgatggggacaggcttaggatagacatttccattccaaaagggaaaacttggaaggaagaaaaaagggtcatgggtccaaagcaagtccaaaacctagctgggcaaattatgttcaattttaaggcctgaaaataattctttttacatgatgatctgtcctccaggcccattgggctggcagaattttttttttttttttttcagtatttattgatcattcttgggtgtttctcggagtgggggatttggcagggtcataggacaatagtggagggaaggtcagcagataaacatgtgaacaagggtctctggttttcctaggcagaggaccctgctgccttccgcagtgtttgtgtccctgggtacttgagattagggagtggtgatgactcttaaggagcatgctgccttcaagcatctgtttaacaaagcacatcttgcaccgcccttaatccgtttaactctgagtggacacagcacatgtttcagagagcacggggttgggggtagggtcaccgatcaacaggatcacaaggcagaagaatttttcttagtacagaacaaaatggagtctcccatgtctacttctttctacacagacacagtaacaatctgatctctctttcttttccccacatttcccccttttctatttgacaaaaccgccatcgtcatcatggcccgttctcaatgagctgttgggtacacctcctagacggggtggcggccgggcagaggggctcctcacttcccacacggggcggccaggcagaggcgcccctcacctccctcccggatggggcgactggccgggcgggggctgccccccacctccctcccggacgggggtggctggccgggcagagaggctcctcacttcccggacggggtggctgccgggcggaggggctcctcacttcccagacggggcggctgcggggcggaggggctcctcacttctcagatggggcggccgggcagagacgctcctcacctcccagacggggtggcggtcgggcagagacgctcctcacctcccagacggggtcggggccgggcagaggcaatcctcacatccctcacatcccagacggggcggcggggcagaggcgctccccacatctcagatgatgggcggccgggcagagatgctcctcacttcctagatgggatggcagctgggaagaggcactcctcacttcccagactgggcggccgggcagaggggctcctcacatcccagatgatgggcggccaggcagagacactcctcacttcccagacagggtggcggccgggcagaggctgcaatctcggcactttgggaggccaaggcaggcggctgggaggtggaggttgtagcgagccgagatcacgtcactgcactccagcctgggcaacattgagcactgagtgagcgagactccgtctgcaatcccggcacctcgggaggccgaggcaggcagatcactcgcggtccagagctggagaccagcccagccaacacggcgaaaccccgtctccaccaaaaaatgcaaaaaccagtcaggcgtggctgcgcgtgcctgcaatcccaggcactctgcaggctgaggcaggagaatcaggcagggaggttgcagtgagccgagatggcggcagtacagtccagcctccgctgggcatcagagggagaccttgcaaagagggagacgggagagggagacggagagggggagggggaggggagggggaggggagggggagggagaggactggcagaatttcttcaaggccccaggtggcagccttgcttttgaggccttggacaatgacagcctcaccctctcacactgagacagagagagcctcaccctttgaaatggaagagagccttcctcgcccctgggcctgaacactttcgttgtggggtgagagtagtagctttagggaccattcttcctttttcttgaaggataatacatgctcacacccagagccagatagatctattgtcccatcctgtagcatctcagaagcctgctgctgttgtgtcctgtctctgtcccctttagtccaagtcagcagtgtttctgctactggtagaaccccgtctctattcctggcttctgttgagatggccaattagatctgtgagtcccactgtcactctttagggagtgattgtccagtcacactgttggtgccctctccagaacacattctcatttttttgcaatatggataagctgagaattttccagatctttaagttctggtttgtttagcctaacaattttttctttaatttctctcacttctcttgcactttaatagaagcagtaaggagaaaggaaagtggcaaggaaagcacaacaggctttcaacacttggcttagaaatctcagcagaatatccaaggttgtcacttacaagctctaccttccacaaaacacaaaaatgcaattcagcaatgttcttggccattttataacaaggattgccttttttcagtgtctaataacatgttcctcatttctgtctaaaatctcactagaatcacctttcatgtccatatttctagcaacagtctctcttagcatctgagacaacgttctgtggaacacagtttggggaagcttgccaaactcaacagattatactatatcatctccccctgaaagagaagagtgagacataagtcctctgcagtctgttccactcctactagatcttgaagtcatatgttgattcttttcatggtattgtgtgcctgtgttttaaggaaaataattagcattcttaaagcaaagcaaaaattttactaaagaaaataattagcctttcatgtcactttcttagagtgaaccaaataagttttgtatgagagaaagataggggcccgtagatgcccactttagttttgcagggtgggttcctacagccacgttcccctgggctaataaggctaatggaatcatggtggcagttttgcattggcctccagctaatgaaaagttttgccatgagaacttaacttagtccttctgatgcttttactgcctgttgacacagaaggtggaaaatgaccaactatgctatacataaaaacaaagtccagatattcttatattcttttagaatatgtcttatgtgctgatttttaaaatattaagggaaaaattgacttgtgatacttgaaagttcatagaacagggcactgcattaaaacagggcttatgcaaataaaacacatttttctgttcttggccagcagttctaccgtcaggatacttattccatacagcactgtatgatacagaccaagatttatagttggtgatttcctgagtaacaactcagatagcaaatgcctccacaaaacaactttcgtatgttctgcaaggcacaaagtagtacaatagaaaggattgtttgcttcaggatttttgtggggtggtttctttttctttttcttttttctcccacaagacagaatttttcttcttgccctaaaatttgaaagatttctcctttctctccccttctgccacaagtagtcccaccctaaaaaggaagatgaggttctctagcaacccataagatgctcataagaaatagcttaaacttttgctttgaaacaagacattcacatattggggttgtgggccaataaactagtcaatagaaagaatggggaagaagcagtgaatgcaaggacagtgttggtggggaagggggaatattctggttttcgtttctgtggatttttaggccaaatttgaacacaggctcttgatgacacatgaagtatctctaacttgattttatgtatgcacactttatgtactatctgtacataagtcatagacatatagattggactagaatttagagttcagaaatgaacactcacttgtacagtcagttaattttcaataaaggtgccaagacagttcaacaaaggtagtcttttcaactggtggtgctgggacaactgggtagccacatgcaaaagaatgaagttagactctcacctcacatcatatacagaaagtagttcaaaatggatcaaagacctaaactatgagataaaagagaagaaaacataggtataaatatataacatataaaataccaaaaatataaacaacaaaagaagaaatagataaatgagacttcatcaagataaaaacatttttgcttcagataacaccattaagaaagtgaaaagacggctcacagaatggaggaaacactttcaaatcatataccaaataagaatcttgtatactgaatatgtaaggaactcttataactcaaaagtaaaaagacaaataattcaactaaaacatgagcaatagatttgaaagacatttctccaaaagtatataaatgggctatatgcatataaaaagaagctgaatatcattagccatcagggaaatgaaaatcaaaaccataatgagatgccactttgcatccactaggatggctgtaatcaaaaagacagaagaatattggtaaggatgtgaagaaattgaaatcctcatacactgctggtgagaatgggaagtggtacagctgttttggaaaacagtctggaagtcctaaaaagatgaaacatagagttaccatatgacccagcaattctactcttgggtatatacccaagggaaatgagaacatacatcagtgcaaaaactagttcacaagtgtttacagcagtatcattcacaatagtcaaaaagttatgggggaaaataacatgtccaaaaactgatgaataaataaataaatgtgatatatccatacaatgaaacattattcaagaaaaagatatgaagtccagatacatcttacaacatagatgaaccttgaaaacatgctaagtgaaaggtcacaaaaggccacatattgtatgagtctatttatatttacatgaaatgttcagaataggcaaatctaaagacagtagattagtgtgttaggggcttgggggtaaatggagaatgactgtttatggatataaggtttctttttcggtgtaaggaagatgttctaaaattgataatgatgatggtctttcaaccctgtgaatatactacaaaccattgcattatacgtgttaagtgttgagtgtatgatgtgtggattatatctcaataaagatgttaaaccacacacagtcatattacataattacacagtcatattgaattccgttataatttcagatttatggactaacactgaatactcagagtattaagcgacctgttccagtgcatatagctggtgatcacagagccagacttcctgaacatcaggccaactgtctctccattgtgattgttacaggaagtttgaccccaacataccatacaagtcacacttaaaatttgtattggtgtggccaggtaccactcacttgttcatgtaacagatcagcaagcccctgaaaccgaggctggcaatagcagtttaattcctgctcctgtaaggttcagtagtgtaggctgggggtgaggagacacaacagctgctgctgcttttcttttttttaaccaacaagaatgaccttgaaaacatggggttctttaccacacaattattcagggaccctgtctgatggaagttcttctaccttctccagccagcagatggggaggagagagaggaggtttatccatgggaggttttcctgagccacacttaggggtggtgcacctctcacactcatttccccacaccttctgtggttacaacccagtcacttggcaccttacagatgctgtggggctacgaatgcagactctggtattgaaggagctacattgtctggggtatataccctggggtttgttgtcgcctgccaggaaaatttaggacacatacacaaggagtttaggagcagaaggttaataggtagaagagaagagagagaaacagcttcctctgtaaaggagggggtctcccagcagaaaggacctgctggtggtgaatgcctcgagtgttatagtagggtttcaagaggcagtgtctgatttacctagagctcatagattggttcaatcaggtatgacatttacatagtgcggggaaggctggtttccccaccctaatcttcttatgcaaatgggctgtccagttagggccatcttgtctgctcctttacagtacaggtggctggcagagaagggaagatggagccgccatcttgaacatgtctactccttagttcccgctggcattcacctgtgcaagctcccagcttgctggctgctctttgatagaaaatgatttggggctgcttttcattaaaaagaagaaccttaccaaggactcccatacccttgctatctgcctgcgtgatttcttcttaactcctatatccctatctgggcttgaagttttctccttatacttaaaaaatcaatccaaaggctagtcagcccgcatgatgactgggcacaagtttagaagtttcatatcatggctcctgcttcattgtgagggattttaatacctttagagcaatgttaagtacccagtctgactggttattctgtcagcagagtctgtcacctgtcctagaagaatagtcttgtttgttgctcctagactggctgatgattgataggagtttccaagttgtatcttattggaaggacctttgagagctctaggcctgtgggccttcctgaggaggtgactgcatttgaataggctctaagtttcctatatcttgcctctgccctgctacagcactacaaggggaaacctggaccatttaccctgcctgttgcaaggtaggtgacaaagaggaagttctgagagaacaaatgaagccccaggaatctactcaaccctgacagtgaatatactatcttctgacctcatactgaaacagtgacaacatctatgtctccaagccgtggaactctaccgctactctggaagcagccctgcagtgttttgttatcacttttgttttacactaggctagaggattcagtttggtgagttgtgagaaattaaaagttggaattagaggagcagaggctggcccctgtcagcttattgagctgggtagccttagccttttctgagctttggaaaacctcagatatcatgtcagaaaatcaacagaatctgagaaaaacaccggaaaatcatcagcaaatggtgattctgatagcatctcttccttatggggtcatcatgagaagattccatgataatccccataaagtatcaagtccagattttggcaaaagatcatgctcaataaacactagttgtcattgataataatagcatcatcttttgactttcaaggcagagaaaaagaggtatctccattgatgcctaatgttaaaaaaagtaacattttgtaaatctttggcaatatcttaaaatattttatgatgtaactgtgatgcttggaaaactttctttttagcagtcagaatctttcataaccatatgttaagtacttgctttgtgtaaacaggttgccaggcacaaagggattataaagagaaagaagaaatggcctttgcctttgagcagttcataatgtcataagaattagccatggctatattttaaataggttgtagctaacctaagtttttgctatcagtgttttatttatttatttatttttaattttttttgagacagagtctcactctgtcgcccaggctggagtggagtggtgcgatcttggctcactgcaacctccgcctctcagattcaagcgattctcctgcctcagcctcctgagtagctgggactgcaggtgcccattacgatgcctggctaatttttgtctttagtagagatggggtttcaccatgttggccagggtggtcttcaactcctgacctcaagtgatccgcctgcctgcgcctcccaaagcgttgggattacaggcatgagccaccatgcccggcctggtatcagtgttttaaacctactgcacatatatcctaatatagacaaaaatgtgattacctctttttaaaaacaagcccaactctaaaatatcatacttcggggagcttttatttttgcctcctgccccttgctcccaattgtcaacttatctccccctactcttgctaccaattgtcagtttacccccagcccctacccctcacacatataccccaatttccaggttgttataaagcattcatatatttttgtgtaaaaaatgatttcttgcatttttccaagataattatttgaaaatgtaattatttgaaaacagattgtgttttaatgtgaaatcacctaataccctaattagtttatttagcttagaaacttggtctagagcagtggctcttaacttggccatattttttttaaggcggcattactattgatttcttctttacaaaatttagcaagtccatggtattcttacttcagtttatttgacacaaggcccacatgagatgtgaatgatatgcatgatatgtgaaaaggaagttcatcatcatcacatcttacctgttccttgttcttccagtttcacagccgttagaatgttagagctggcaaggactttatcaccaaattcttatcaccaacacccctcctttagcagaggagagaaactgaagctcagagaggtgagggtacttgcttgcagtcacaccaccactatgtggctgactcctggtgcagaaccctcccttcaacccagtgcctctccctggctggtaatctcttgtctgtttttctttttttttttctttttgagacggagtctcgctctgtcgcccaggctggagtgcagtggcgcgatctcggctcactgcaagctccacctcctgggttcacaccattctcctgcctcagcctcccgagtagctgggactacaggcgcccgccaccacgaccggctaatttttttgtatttttattagagacggggtttcaccgtgttagccaggatgatctctatctcctgacctcgtgatccgcccgcctcagcctcccaaagtgatgggattacaggcgtgagccaccgcacctggccctctgtttttcaactcccttttctgagctgtcaccaagtcctcttactgtttcctggaactgtctttcggttgtcttccttcccgtttcttcctggctgatcccgtccctcaacatctcacaatgggaaaggcctgacagaggagtcggtctctgaggcgtccattataccatattaattttctctaattaccactgtcagcacattactcctcttcggtgaggctgccaggagctccctgcttcttgtggctacaaatgtcaacaccgtcctcacatgctagaccttccagagcctagcttcacgggaaggcccagcttcattgctcttttctccctgtgagccccagaggcccactgtcttccctgggttttcttcgtgagtcagccatgtttcttttatgcctttagtttctgttctccccagcttccggttctctccctgcctttccaactacagcaggtcctccaataatgtcgtttcattcgatgtcatttcctcataatgttgatgaagaaaaagaaggggccactgtggagttcgtgtggtctccccaggtctgcgtgggttttctctggggactcgttttcttccacgtcccaaagatgtgcatgttaggttaactgatgtggctacatagtccccactgagtgtggtgggggtttgagtgtatcctccaatgggaacgcatcttgtccagggttggtgcccacccccctacctctgagctgctgggataggttccggccacccaagaccctgacctggaataagagggtgaagaattttcttactttttttgtttttccagtcccttcattatactaaaagtttatgttaatctttcttaattgtatgtatagctcacatttatttcagtgtttaacatagaagtgttttggtctttatttagaagtttgttgatgtttttgtgaccagaaatatgcaataggaacttaattattttttagagacagagtcttgcactgttgcccaggctgtaatgctgtggcctgactacagcttactgcagcctcaaactccagggctcaagcaatccccctacctcaaccccctgagtaactgggaccacaggtgcaaaccaccatgcctggctctttttttttttttttttttaagagagccagggcctcactgtgctgcccagcctggttcaaactcctggtctcaagcaatcctcccacctcaccctcccaaagtgctggaattacaggcatgagccatagcgcccagtgtaacttgtttatagaaattagcctatggtaaaattgattttgttatacattattttgcttaaattcatagttcccaagtaggtgaggacttactgtactccattcttcaaggccaagtccaggttctaccacctttttaatgttttccttgattgctgcagtgataacccaattattcccctttactcccaaactttttctgattatatcctaccatgtagcattgcacatcatagcctctcatatggttctctggcttttccttagaattgtgttgccttcttaattatatttaatgctctttgaaggcaaggcttatgtttatatttttatcatatatactattcccctcccatccgttggaaatatgttcaaagaccctcagtcgatgcctgagactgaagatagcaccaaaccttgaatagactgtttttgcatatagatacatacctatgctcaggtttaatttataaactaggaatagaaagagattaacaacagtaactaataataaaacagaacaattataacaatatactatgataaaagttctgtgaatgtggactctgcctctgtctcaaaatatcttattgtactgcacttacccttcttgtgatgaggaagggatgggagtgggatagcatgagatttcatcacactactcagaacgatatgcaattaaaaactcatgaattttgtattcctggaactttccatttaatattttcagactagttgacctcaagtaactaaaactgcagaaagtgaaaccttggataaggggggtctactggattccaattttatagtgcctaataaatggtcagtaataaccacttattaggggcttgttgaacttctacaagttgttgttcagagctacaagcagttcagacatattacagtgttggcaacttgggttgggatcagttgttaatattggggcacggtgctctactgtttaagtgttggcaggatcagtggctactgtgttaatgatcctctagggagactgtctatatagatatggtgctcacgctaatagttggatttgtagatcagtagctgggtggcagggaggctgggggctccctgctgagaactgcacaccgggttcttgaatcttgcagtaggtaatagttacttgagaaaggagtatcctcatgactctggcagatcctcagcacaccattgtgacatgtgaactggcctgtctcctctcccactgtaagtccttgagccagtaatgaccttggtgttctcttttctacaatactggcacaacatcttaaggtttaatctgatctttgtctaaaatatttttttcagaacccattaagtacggtgtcttcccaaaaaagataagtgtgttgtcataagttcctggtattggaaaaaggagtctgtgttatttaaagaagccttgtctgcttccttaattccaatgccccttttccatgccttcctacctttcctggtagtcattcctggactgaggtaactgcagattttatagtacttgggactatgcactccctaaggcacagaccgtataagaattgcctctgccaagggctcctaaacttggaattattttttctttaatgtcagcaggactaattccacctatacaaaatggtttggccttttccttctttggcacaaaagagacttggcagaggctcagataaaggtgaagttgacgagctctggcatgggagtgagctcagcgcttctgggctttcattccccctgttcgtctcatgttcaaaatccccattccacccagaaagtcttcccttcccaccagtgacaccgaaagatgtttcagatccttcttcctttgtctccaacacacacagcgaaatgctgcatgccttcatttgcagaaagttacccaactggaatcactttaatattttttttttaatctctttaggtggatggaagtttgcttagttgaagaattgccaccaaccactgaattggaagaagggctccggaatggagtttaccttgcaaagttagccaagttctttgccccgaaaatggtatcagagaaaaagatctatgatgtggaacaaacacgttataaggtaaccaagatctaattggttttggcttccagctaaaagtgaaagtttggtatttcatatcctctcccttcttttactcttagtgtttctgtaaggatttggggggctgggggatgtctttggagcctgttaatagcattcctgaggcagcagcagttttaaaaagcaaagtgtttctatttctggtctgacactaagagacctctgacttatggggcttcccaatgcctcccccaattattccttcagggaagtcactcttgactttattagtgccagtaaaggtaaaagtgggggcatgctaccactccttttttcacttgaacttgtggccctaaagagttagggccaatgtgataaaacaagtaggaaggtcgaatgatcagccaagaattcttttccatttcatgtttaaagcaagatacgactaaccactttgtgtacaactagttttaagaattgtttcagggctaatttgggaagcattagaaaataaaaagctattgtagcccttttagaaacatcacaacagctgagtgtggtagctcttgcccataatcccaacacttttggaggccaaggtaggaggattgcttgagcccaggagttcaaggctgcagtgagctatgatcacaccactgccctccagcctgggtgacagagtgagaccctgtctctaagataataatagcaagaagaagaaagatcaacaataaaaaccgcactgttatttaaatttagaaggaggagggagaagaaaacaaaattaaaataaacatcaattttatagtaataaaaatcccgattttttagagatacatatcaaagtatttacagatgaagtgatagatctaggatttgtttcaaaataattgaggggaaggtagacagatgataaaaagctggccatgagttcataactgttgagttgaatgatgggtacataggagttcattatactattctgtctacttttttacatttgaaattatatattcagaaggaaaaggaaaaagcaaacgccaacctaaaaggctcctccattagcaatgtatcttcaaaacagattttttaaatgtctggtgttctattctgcaatatgtgacctcttgtctgctgcaggtcaaggtttctaaagcttctttgaaacttgatctttatttttttaatgcattcagttctttatatcaatattttttatctgcagattttccagtattctgaacagttatttctcttacagctgtagggaatatgttgcatatagttggaaaaggaatgatttcccatttattgcatgattcatagtacccttcacttctttaggcaaaatatattctttaaatatgtatattaaatacagatagaatgtttgaataatcttcaaggttaacagtagacaagattacttgtcaaatttattttgagtctgtttttctagtctggtcaaaaaggtcactgagcaaaagtttttgccttgaataatgttataaataaaaatgtttacatttattaaagtaaatttgtgttcatgaagtttcactccagagttccagctcattataatcttccacaagactttaataaaacaatcatttagccggctaaaattgaagtttagaaaaattttttgagaaatgtttttagaaattcagagaagcccagaaaaagaccatctgtatcctctctccacaaaataaatattagtccacattttagactacagcttgtctttttttcattgcttttattttggttataatcaagatctaggtctgtcagtaccaacacgtatgtagatttgatgatagagttaaagcgtagttggggtaggctccagctccactgaaagggaattacagattttcttttggctttcatgaactgtgagaatcaggctgggaagacgggcccttcatggaagtgagcctcagagcagtatgtgtgctagttcttttctcttcctggaatgttgtataccttgaatataggagtgtccttcctgaccagctcagggccctcatggcagttgcctcatggcaacttaaacaggtaccttctcctcctggcatcagatatcctattatttaaatgaatagcaacttctctttaggatggggacaggggaaataatattcgcaatttctggttatggaataaaatacttgcggggcgtaggcaggtgatgacatacatccccaagtgaaacatcacaagagggaggccacccctgccccatcagatccctggaaggccgggtggcacagaggtgatgctgggagaggagcaggaaggagggaggtgcagcaggagggagatcgtggccagctgtggcgtgggagcccatccttgctgagctaaaagaaaaaaacataagacaaatggaaaggacccctctgtggattgactacagaaaagaggtttgtttttttctttattaaatccctgaaagtgcctagtgttcttgatggaaactttgagtgatttgccatgtaatcataaaatcttattttagcgccttttcatctctcatacgaaaatgaaaggagataaatattagcaaatagataatgcaacttcctgatcttgtgttcttcaggactgaagcatgtcacatagccctttgcaaggagagctaaatcatgggactaaggcaaagatgttgaagcacgagggaacgctcaataacccagccccagcccctcgtgccatctggaaaccatgaattcagtgaactcgggctctcgctgcagggtctgcctagactgcagccataaaatatgtcagccttggcactggcagctttgatggccatcagttaggcagacaggagcttttgtgctacccccttctctttgtcagcttatgtacaaccctagttcctcattaatttagggttggaaagatgtcctgagtattagagttcaactttccagttataagtattttttccatggccacctccgccctccacaccaggtctgagttacatgcccacgccatgtgcactgcagctcctgacacagtctctcttgcacatgccatagtgtattgtaaagtgggcaggcaccgtatgtgcctctatgccccatccccagcaaatggggcagggtcttatccacagtaggaacttggggaatagctgttggatgaaggaatgaatgacaatagtttcacataagccaaaggattccattccttttcttaccttctgtgctttatttggtacatactcagtatgctgagtgtgatactcttcctctaagaacggtgctcaagcctcctgcagaaccacctaatgggtgtgtgtaaaaattggattcctgggtcccaccccagactactgagtcaggcagcatctcttgacccaggaagcggtactcttaataaatcacctgcaggtgattcttttcttctgcactttgagttgagaaccactgctctaacaggtgaataaacattaatataacaaattgcaatacagttgtagggaaggaagataaaggtatgccacgatagaaatacatatagggtagaattcattcatccatgcaacacttatgaagacccattgcatgtcaggcactattctaggcactaatggcagaatagtgagccaagcagacaagggcctggtttcatggtggcggggaggcagactaagtgaatttatagctgtgaattgtgataagtgtctgaaggaagacacgaaagccagtgttatgggtagatagcaacggccaggagatgggcttctcagaggaggagtttactctgaggatggaagagtgagaagaaagtcacctgtgtgcagtcaagggtgggcactgggaagaactgtccaaagagagggagctcatttgtgagagacttgccacaaggaggaaaagagcttgtccgtagcagagtggttgaaagggacagtggtggaagatgaggccaggaagagcagagatgagattgcacagccatgcaggccccatggagcacctgagatttcatgctatgttgaggggacagcaatcagaagccttgtgatgccatatggtgcagtttgcgcttcagaaacatcagttgctgctatacagagaacaaaccagaaggaggataagaggggagacagagtccagtgaggggataactcagtccaggtggcagtgacctgcacagacaagaagtgaactgcttcaagagggaaaaccaagggtggatcctgaaaaggaaatagaaatggatggagggccatgagaagacagctgggtggacagtgggagatgaccaaggaggagggagcagtcccgtccattctaaatggggtgtttggtggtgaagggccaggaaggtttccatggtggggacttgagagattagagagtggtcccaagcagactggggcaggcaggagaaagaggaatggacagaagggccttccttggagaggtttcagtctgacaaggttcaaagatgaatagtactctgaacagcaccttgataattgtaggtttataataaattcttgtcaaataggtaggtgtgccttagatagggaaggcatgcacacagtggttagcagtgtgaactgtagaatcaaaatacttcagcgtctagcttcgccattaactttggctctctgagcctcagtttcctcacctgtgaagtgggaatacagattgaatatccctaatccaaaaatccaaggtgttccaaaattcaaaactttttgaagaccgacatgacactcaaaggaaatgttccttggagcatttcggatttcggattttgggattagggatgcttagtcagtatgtctgatgcaaatattccagaatttgtaaaaatcagaaactcgaaacgcttctaatgccaaacatttcagataacagatcctcaatgtaataacaacagtatctgcctttgtggagatattgtgaggcacaaaatgatccatgcagggcacttggcatggtgcctgacagacatgagcatctagtgaatattggaggcagtgcttgttctaaggtacttgagcagtaaaatgagtataatatttggacttgaagtccaaatattatgggattctgcaagggagtcttaaccttgagcctaacaagttaggtcaactcaagcatcttacttatttgtgccatcagtttcctcatctgtaaaataagcaaatttggataatgttatttgtttctaaactacctcctggttttaaaatgctctaattccaatatgtagaatgttagcatccaatgatgacaatgtaattcctcatctatgcagtttaaactagatgaaccatgtttgctggtgtaatagctcagcagtggaaaaacagcatatacttcctggtctaatacctgaaagaaattaggtgtatggataacagcaacccttggctaaatctgactgtagacatgtcacctcatctaatagtaatatacaggactggagcgggaagaaaagacttgttaaagatgattatagtggactgggattatttcaagcctaattagaagaccattttcattctaagtgaagcaaactcagtatgttgacaatgttattgctgcaattcactaacgaaagtgtgctaacatgaatcacaggattctgaagtcagcattctcaggtagtttaaaaggatgaaggatttgaaatctgtcatttcatttgttgcagaaatatgaccaagataaccacccttttcttcagtgcctcttaacatgaagcactgaaattttttctgaccttaaaggtaaacgaaagttccaagcctaatcttgtattgtaataattataatagctaatatttactgcattcttaggtgcactttgcaactaaataccttccatatattctcagattaatctctgcaactcaaagaagcattttgtggctcaggaaccaaggttcagagagatttctatctttcctgagattactttgctaacaagaccactaaacacatgggtgtctttgttacataatttgggattgttggagcccaccagttttggacaccagaagccctctgtggtcaaacaagattaggtttatttaacttgttgggcaagaaaagtgcatacccatattgccacagtgaagagaaatgagtagatttgggcttgtgctgggtggttctagtagggatttagggaagcaagaacccattttcttttgggtgtcatcagaaagtgggatcaatttggtgtcttggtaatttttatctaagaggtgggaagattgaatagggacttagattgtcatcagtaaagaaagcagagtacctcatattagttggaagagggggacattatttattttgtggcacagagggttctcatacctgtcttggttcagacttgattgtggattgtttctatcttgttcttccatggtcacagagtggccttgtctgaaaattatttgcataagcaaatttttgctgagttataaacactcaaacagtatagcctgacctgtcaactctctgggctctgtttattccttttccttcttcccttccttcaactctcccttcctctatctagttcattagtagttaatttttgccttccaaagaataatcaaacaatctaggtccttcattcttctctgatagagtgttagcatagggaaggttttcagatccggagagatgtagtcttgaatcctaggtcagtcagttgacaactacttgactttaggcaaatcacatcatctttttggtctatctttccatatctttaaaaaatagaaatttattccattgtgtgaatgcaccagagtttatttaatcttattcacccactaaaggacatttccattattcccagtttgagtctattaaaataaagctgttatgaacactgcaaaaaaaaaaataggaatgataattacctttcagggtgttttgaaaattagggttaatttacatgaagtgattggaacacatggttcaatcacgaatagtggccaccattgagaaggcataaacatttgtcaaatgttaatttgcttatactttatatttctaacagcaatgaaaatactttttatacaacaaattattagattgtagaaggtaacagaaggtggggagagccaaactttctgaatgtgattatctactactgaatgttagttatatggtaaaacttgctatagttattgttttgtacatttattaaaaattacaataaatagataacatggtgctatgcatttaattagtgaaaagcacaagatcattttaaagttcttaatggttcattcctgataaatttttatgagatacaggcaagaatgctatacttacaggctgtgcagaaggaatgactatctgatgagggctataaagaagaaatggaagatacacaaaagctatttttattgtaggggtagaaaaagatcttgttaaatatttctgctgaaggtttgtttcttatatacaaggccaagatcagggttaaattagaagaatcaatactaaagttagttctgaattgtgggatggtttttgttttcatctttgtattttgctatattttcctattttccaggttttctgcagaaatattctattcatgattagaacaaaaaaaaatgtagtcttctaaaaatcctgtctttttctgaagttgctaggcctctcagccatggttgccaaaatctggacaccatgcatgtgtgtgtatgtgcgtacacacccacgcctgtgtacatgtgtctcataaaacatccttaagcatgagctagacattaaacagtcttggagattctagttcagaatttacctcaaacgtgtgaattatggaaattcatggttcatcacagatggttgggatgttgccaagatacatcctttagcacgcctctgtttgctttatgtgaacattaataactctgttccaggagaaatacaattgaaaagcatcctgtacatgaaaaaagttattgcaaatgactcactttttgtgtggttccttctctccctttttccctcctatcgtcactttagaagtctggccttcattttcgacacacagataataccgtccagtggttaagagcgatggagtctattggtctacccaaggtaagccttcacgcactggaatctgaactagaaaggcaaaggggtagtacacaaacatctctttatgagcaatgactttggagactgggttatgttaatgtagaaatgagaaatgtgaggactaaaaaacatggaaagacctatccaaagtaacatatggcaagaactcagaatgagggatgtgcccagattgagagcagccaggtaaaattgtgcacaaaataaaggcagaacaagctatagctggtagataggtgagctatctaaaatagccaactccctttcttgtgttgctatttgtacataaagattctaagtctcagccacttttggtggctcatgcctataatcccagcactttgggaggctaaggtgagagaatcacttgaggccaggagtttgagaccagcctgggcaacatggcaagaccctgtctctattaaaaaaaaaaaaaaaaagaaatctcattgtattagtatacactttattactgtaaattattataaatttattttttgtaaattattgttattattatttcaagacagagtctggctctgtcgcccagtctggagtacagtggcttaatctaccacctccgcctcccatgttcaagtgattctcctatctctgcctcccaagtagctgggaacacaggcaagtagctgccccatgcccagctaatttttgtttttgtttttgtttttgtagagacagggttttgcctcgtcggccaggctggtctcagtctcctgagcccaagcaatctgtccaccacggcatcccaaaagtgctgggattacagggatgagctaccatgcccggcgtataaattatcattataaatcataatatcacttgtaaaggctagtgggttatagctcttactcctaaaatagatctcctaaatataatttaactcagcaaacattcagtgcttgttaaatttgaagagcaggcatcctaaagtctgtgagagaattaggcaagtggaggaaatgaggaaataattacatttgataaaaattgtagaactatttttttaaacttgttattttgaaataattatagaatcacaggaagttgtaaaaatagtacttctatgtttatccttcattcagctttcccctagtggtgacatctaactgcagtacatgttaaattgacattggtgtattagtgtaaactagactacagacctttttccattttcaccatttcatatgcatttatttgtgtaagtgggcatgtgtgtgcatgtatgtgtgattctgtgcagttttatcccatgaatagatctgtgtaaccaccaccacaatcaagacacagacacacagaagagtggtccttctgattgcatccctcccccagccctgttccctggcaaccactaatatgttctcgatctctatagttttggcattttgagcacaatatataagtgtaatcatatagcgggtatcctttgagtcacatcgtttccactctgtatatggtccttgagacccatctgggtcaatagcttgctcctatgtgttgcttagtatgtacagctattttttttttttttttttgagacagagtcttgctctgtcacccaagctcgggtgcattggcacaatctcggctcactgcaacctccgcctcccaggttcaagtgattctcggggttatcacttacaggcatgcaccaccacgcctggctaatgttggccaggctggttttgaactcctgacctcaggtgatctgcccacctcagcctcccaaagttctgggattacaggcgtgagccactgcacctggcctgaaatctgtttcttatcaggctgttagtttcaagtttaagaaaaagagtaagaaatagtatgtaggataaccccccgagttatcaagtgtaacctcccgagtagctggggttacaggtgggcaccaccacacctggctattttttgtatttttagtagagacagggtttccacatgttggccaggctggtctcgaactcctgacttcaggaaatctgcccgtctcagcctcccaaagtgctgggattacaggcatgagccaccatgcctggcctgtacagctatttttaaaaaattatttaggagtggtctcgctggaggtcaagaggataagctactggcttatgaagacctctgttgtgccaggtgtgcagtgaaaaacacccactgccacagaaacagaagattctttaaatgtaatttattaatgcccatttttaatataattgtgctcatatctgttttaggtcagtctcattttatcttgaaatgatcagtgtttaaattttgttctgccatttttaatcaaactattttctcttctcctaaaatgcccagaacgttaaatgctgtttccttctaggaactggctgtaatacataattcatatttctggattgtgatttagcaactactaactagaggctggatgataaaccgattaataaaaaacgaatttaaacagaattgttttgtataaggcaacatcaaattcagataatttcattggatttgatagatttgatgtaaaccttttcaaattgtatgtatttagggccaaacaagtggtgttatagagcagattttattttaacattggtttttattatgaagtcattgatatattgcattgcaggggcaagagactgtactgagttgactttgatgtatcatatttaacttgtattccttcatttatcaatattaagtgcttactctgtgctcagtatcatgctaggtgccagaaatacaatgctgcataaaacattctggtgaatgataaattgatctcatctccttgctgaaggaagtcatttataatggctttccaggagaaatataaatataaaagattcttgtttaaagaaaagggaagaggcaattgtagttattctctgcttacataaaaaactttaaaccggtaatactcttttttgttgttttttgagacggagtctcgctctgtcgcccaggctggactgcagtggtgccatctcggctcactgcaatcttcgcctcctgggttcaagtgattctcctgcctcagccacccaagtagctgggactataggtgtgctccaccatgcccagctatttttttttttttttttttaatttttagtagaggcgaggtttcaccatgttggtcaggctggtcttgaactcctgacctcacgtgatctacctgcctctgccttccaaagcaccaccatgcccagctaatactcttctgaatttagggatcctcttctcattgatactttagtagcaaatgcattaaaggaaagttggaaaggctttttaaatttcttaggctactgccatttctttaagtacttagtaattatatattttgtagctcaagaaactttgcttctttcttttctcagcttttctcagtgaccaataggaaattgcacttgagtatcacgtactaccatatgatgcattattttagtttttgatgtcagtttttataaaatatttacttaaagtaaataatgtctaaatgattatcttaattttaaaagcctcaagcttaattattttttgtgtgtgcttaggaacagagaagtttggtgcctcactctgaaatctgtttcttttgttgatttgtttgttcgtttgttttgttttgagatgaagttctgttcttgtcacccaggctggaatgcagtggcacgtgcttggcttactgcaacctccacttcctgggttcaagcaattctcctgcctcagcctcccaagtagctgggattacaggcatgcaccaccacgcctggctaatgttggccaggctggttttgaactcctgacctcaggtgatcgcctgcctcagcctcccaaagtgttgggattatgggcgtgagccactgcacctggcctgaaatctgtttcttatcaggctattagtttcaagtttaagaaaaagagtaagaaatagtatgtaggataacctcccgtgacacacatttacctatgtaacaaaccttcacatgtaccccaaacctaaaataaaacatgttagaaaaaggaaaagagtgtgaaggtgtattcaaaactttgatgttcagacctttcagtctagtaatttcatatttagatgattatccaaaataatcagatgctcagaaaatacagaaatattcattgcagtggcttataatagggaaaaattagaagcaaaacaaatgttcaaccatggattaactggctaagctagggttcaaaaatataaacgaatcatatacatctattaaaaataatcttatagtataatgaaggggatgggaaataattgtgttctgtaaagtgttttaaacaggttacactaagtacaattttgttttcacatgcacacatatatataaacctaaaaaaatcagagacatacagaaaaaaagaccagaagaaaaatagggacaaaattgctaatagtgacaatctgggaggtggggtcatagatgtttttccttcataccttatatactttccagattttatttggtgaaaatgtcttactttaaacagattttttaaatgtgtgtgtgtgtgtgttgtatatgcatgtatacatgtgtacagagcacatatgccaagtttttaacaatgcaataaagtggctaataacaaggacacccttctcaggcccatgggacctctgggaagtcacaggagtgtgaaggctacaggaggcagagcccacatgtgctcatatgccctatgaaatgaaacactgccactagcactgtggacacagccttcttggagtagctggctggggaccccaccatcctcctgtggaccactaagaggcatgctgtcaggcaggggtccagatatggtgattggtctatctctacagcaagatgaagcaatggcagagaggttcctctatatttaaataattataggatagcaaggacaatcaaaatagggtcattttgggaagttaaaatacttgtgagaagcaaaacatataataaatattgtttcttttgttttccagatattttatccagaaacaacagatgtctatgatcggaaaaacataccaagaatgatatattgcattcacgcactgaggtagggggaaaatgcagctaaaaggtgctctaagaagtagatttaaataaaactaaaatttcaattttaaaagaggttttaagttactttaatagtttgaagaactttttattaaattccattgttttggatttgctggtacaaaattaaaataatggtcacatataagcaattcttgaacttgaaaaatgtttttctgatttttaaatctaactcaaaatagaaaaccagaaaatgattgaaaaccattaagtacaataaagagaaaatttaggttgaaacttctagaaatccaattgtaatgtactactatattcttgagttatgacctagtttacaaatataatgcagatatatcaaatgagcaactttaatagtcataattttggtttaatgagttaaaattataatttagttcaattcttacaaattaagaaaatagaggtaagaatggtttcttttgatcttctgttcaatagaatttgtaccctaaggataaagaagaaacatagtagtttggtgtaaattagtcaaatcaagacacattcattattttaaagcaattgttcaataacttaatttttgaaaatgctgaaattctgctagttcacagattacattttatcttattggcctggaagaaatgtgatttttagatggtaacaaagattattctaaaaatccagtttgtggctgttgtcttgaatgtacacaggtaatggttttggaagacttcatgtctgattaaattttaaattacttttagaacatctgccttgtgttttcatcactagaagtcattttcctggcagagtactctgcctagaggtttatgttgacttcttcctggctcttttcctctccaaaggaaaatgcttctacaataattcatggtggtgttggctttctagagaagaaatttgattatgtcatataatttgactttttcccccagtcagtacttatgggattgctttggaagatgacagttgctagaaatatagaccaagtgtaggtgcctttgctatgatttttttttattctagtaacttagaacaactggttaaaaaaagaaaaacagcaacagtaaaaacaaacctacttcatgctgccttctcagatgtggcgagagtatcattatgccacaggttttctaaaagctccttgtgcaaaagtgcttatgttgaggaatattttcaacttgtgttgcctgatattctttattaaatatttttctgatcttagaatgataacactatagttagtactgggtctatgagctgctaagccagccacgactagttaatgccattgctacatgtgtgcatcacagtgctaatctctagttctgtcgcatgctcgtgggctgtctcgtataagtttcaattgattttctgaaatagacaactgggacattcatgttaaggagcttataaacaaatggtatgctaagttcctttctggtgatatcatggttctcctaaaggagctatctagagctgcacttagacttacatgtgtatttgccatggttttaacaatggcttgaatagcttggtaaacaaagaaaaaacaactttttgtttattattaccaattgtatacaaatattgatgtgatattttccaggactgtgtttttcagttattcatcatagacatctccattacttttactcatcctggaggggattcctgttgggtcatgtcattcaccagatctgatcttaagtaggatattttatcttcaaaagcaatatttatttagtaaatagcattctcctcgcttttctttgttctaaattattgtatagctgcctctcactatggagccgagaagtcccaagtgtatcttgcagctttttccaccaaaacttgttcctgctatgatttaaaatgcagtcagtcactcaaaggaggctgatattctgctttgttgtgcaagacacatttgaaagctgaggaacaatcctctaataaatacagtgggtttgataaatactcttgctgcatagttagaaatgatgatggaaatgaactaacatgtcttcagcttttatatcctggctgcaaatacagcactgctgctgtatttgagagttgttattacctggtagagtaattaggcaggtcagagattctgattataactcagaagccagcaaggaagtttccctaggaagttaagcttgccaggcgctgccttcttcctgccccagcctgtgggcctgacttgatctaaaaagttagctcttagccctgaccaaacttgtctcctattccctgtcatcttgatttgggcttaacaacctaacttctgggtgcttatgcttgcttcctgtttgtatctgtgttcccctttgctgcctgcccctcaccttatcattttatttctgatcccagtctcgtgtcctaccactcaccaatccctgtgtcagtttagcttggtgttctcaagccagactccatgaacattaccacagcagcaaagggaggaaattctcaagcttcacctaatgtagacagactcaccttagcggtggatggcatcttttttttttttgagatggagtctcactctgtcaccaggctagagtgcagtggtgcaatctcagctcactgcaacctccaccttccgggttcaggtgattctcctgcctcagcctcctgagtagctgggactacaggcacgcactactatgcccagctaattttttgtatttttagtagagacggggtttcaccatgttggccaggatggtcttgatctcttgacctcgtgatctgcctgcctcagcttcccagtgtgctgggattacaggcatcagccaccacgcccggccacatcattctttttctaaagaaatgtttgtctttttctcattttttcaaaagtaatgtatgctcattgtggaaaaaattggaaaatccaggaagaatgttaaagaaaaagctaaaatacccactatctcaacaccaagtaaaaaccactgtaactattttgatatctttgaacttaaagtgtatactgcgtatggcatgttttacttttgtggcttcttttggaatgttataaagcctctgccttgaaaaggaaccagtttaagagtgagagccttactaactagttactatactaatttttaaaaaatatctggaggccttttacgtaagggtaagaacacttttttgacatgttgtttagtgcccaccttattaaagatgtataataaatgatattaaacaactgttacttgtttaaacagtcataaaagtgagttccttgaaagagttggaataatttagtagaaatgatgttttgagtacttcagataccttaaagagcaggtgaaatgcccaggtacgttattacaaacttactacactggaacctattctgtaagacccatactacaagtttcactcattttgtttattatttataactagttttgagttgtccttggctattatattattttgatacctacccagaattgacataatcttcgtggcaccagaaacaaaagaataccctttcaaacctgccatgattacagatctgggtttcggatggatcacttgtgagtcagaacatggcgcaactttgggttcttctcccatggcgagtcagaccctggccacaggcatcaggctaaactttctttgtttaaaaaaaaaaaaaaaaaatcagaccgcatttaagtacccggctttcaggtaggtctttatttacaatctggtccccacccctgccccccttccccattaccctgaaataatttactttcttaagtctcacttgaccagcattgtataatccattgtcctgtcataatgatgtattggcctgatccattaacattattaaaagcttatgtatgccttttaaatattttttttttaattagttgggctttctagaggttttcatcccctgggagacaagggattgactgtacccagtgatccttaggcttttgggctgatttatcatctcagatcatgtttctagtcctgcctccacttagttagtggatgtgaccaccagtgctggaccctctttctacccggtgtttctgtcaccacctatgctccttggttcttccttatcttggggcacttcctttgttttctgggactatttagtttactcaaagttcttggtctttattctttcatgtagtataaatagtataaaaatatctatatataaacaaatataggccaggtgttgtggctcatgcctgtaatcccagcactttgggaggctgaggcaggcagatcatgtgaggtcaggagtttaagatcagcctggccatgatggtgaaacctcatctctaccaaaaatacaaaaattagccaggtgtggtggcaggtgcctataatcacagctactcgggaggctgaggcaggagaatcgcttgaacctgggaggcggaggttgcagtgagctgagactgtgccactgcactctagcctgggcaacagagggagactccatctcaattaaaagaaaaaaaaaaaagcatggtggcacacgcctgtagtcccagctactcgggaggctgaggcaggagaatagacccaggaggcggagatcacaataagccaagatcgcgccactgcactccagcctgggcaacagagcgagactccgtctcaaagaacaaaacaaaacaaaacaaaacaaacaaacaaaaaacagatatagaagaaacaaagtacttgtgttttaataatgctccccaacttgttaaagtcaatataaatacacattcgctatttatctcttttttttattacaacttcctttttggacactgtatattattctcttgattattgttttgaacctgtggcctttctcagacttaaccaagattaatatctctttctttttgatgaaccagattgtttcagcttggtcagtctgagctctttctggcccacttccttgtccttctagcaccgtccctgacattctttgaaatatccttgctcgtggtcacaacaggatgttccagtcctatcctgattatttctgctttgagatgtggaaccaccactctctagggattcctcttaaaagtcatgtgtttatattaatttttcaagtttaaccttattagcttactggattctgcttttcttgctgtctagttcatttgaccattgagattcttctacatgggcagccacaaacggaagctatgtctgcctctcctctgtgataggattactcttcccgctgctgatactgtagctgtgtcgcagcagccatgttttcaggtgcaatggtgatgccatggctctggcagacccacttctggttcaccagccgtccaggtactctgggagctttgtggagtagagtttgtctagccagctcccacacagccaggtggctgtcttgcttaccaggtggcctttgaacctgctcctcaggcattaatgcataactttccttgtcttaacactctgttcccttagaaccttttccttccctaagaaactgattgaacccttatatcagattgattatatctctaacagtgaacatatttgcatttataaataagatttccaaagacagtttcttagctcaaaggacaggctctaatcctaggttctcagaagggatatctggagatggcagtatttggaagtaaggtgagggaggcagttgcacctgcttatttctttcaagtccttccttgctcagaattctctctgtgctctgaaccattcctttccctttcctcctctttctgtcctaaattagtatggtggttatgcctttctgtcttcctaaattctgagctcttaagagactatgaaccacatcttgttacttcatacagcttacgtgctattgattccaagttaaagtctctggagtttgtatatttaactcttcaggaggtttaattgaactaatttctctatgataaggctacctcaggattcctttggtttggggctgaaaattaggtatagaaccctggattttgatatgatattggcagtgatatatgtgactaagatggaaaaatttggttcagtaaataaaactatttcaaacatggagtctgtggtgaaatagagattcttggcattggaaaaagtaagaaaaccactttgataggttatcaataagtgtttgtatacaaaggacacatttatttaacaaagaatagtaagaacaaaggttaacacaaatggagcttttaactatgtgcctggcactgcacaaaatactgtactggtataatctcattttatcttcataacatatctgtgcagtggtcactattattactcccattttatcaccaaggcagttgaggcacagagaggctgccgaaggtcacacagttagtaaaaaccaggatatgtgagaactgaacctgtgctattatgaattcagccagccaatggcttcaaaagaagtcaattatttccctacttctaagaaaattaaaagaacactggtatcagacttgaacttcagcacaggcctctcagctattatatttaacatgttttaaatgaagaatcatggaacttgagaaggggaagggccttgggaagttattgtagtctaagtcattcatttcacagataagggaactgaaagcttgggttacgtgacttgctcttagtcacacactgaggttttaccagttttgggaccaggattcagcgcttctggattctagtcctgtggtctttctgctctaccatgaggctttgatatacaaacattcattccacatgttatagtacaaaatgagctacacataatgtgatccaagaaagctgaaataaatttagctcctgccttttaagtttgcatttcattacgatagtaccttttagtgtatatcctgaaagtatagaaaaaactaataccactagttttatcttgaaagtggtagaaaaaactaatgccatgtgatattggcagtaatgtatgtgactaagatggaaaaatttggttcagtagataacaactactactactactactactatatactactttcatgatatacactaaatggtattttttaaaactttctttattgcttcctggactttaagtgatattatttgtacaagtaggagcacatgggtcaatgagtcggtagctacctctgggcaacccctccgttgctggcctcactcagctgcacaggtgtgctgtagcttttggtgtggtaggaggcttgctacctcacaaaaagtgctctcttagacatgagaagcaaaggtgacattaattccatgacttcctttggaatgctctcagccctttgacttggctgttaggtaccaaacggtgcttaataaattaactgttgaagagctacatgagattggcactttttctattcgatgggcttttttgttttttagattaagacttgatttcctatatacttcaggtaataagcagcctcatttgaatttaaatgcttgggaaggaagtttgctattgctgtttcttttcagcatgggaatactgggtaaacacagtttcctgataaacatttgcccgtttgagtaatcagctgggaagcacctcccacacagagattaggtgtaaaacgcccataccatgaaaagtgatctttccaaagctaacagtttaaacctcaacatcaatgatttaaaaaaaaagaaaaaaagttgaaaattgaggccaaacagaaactatacaatattttttttaattttttagtaaatgagattttttgatatatgcaaatgagatctttacctgatcaatattagcttaagaaaatatcagacttaaatttaaaagcaaagattcttccatgttcagaaagctaacttctcagcaccaccttgtggtaacttttacttaagccaggatgtttgtttattgtaagatttatattaatattacattgtacaatggagaaattaaaaatgtaattggaaatagctatctaacttctttatcatcaaaggggaaaattaacagtttagtataaacattttacttcatgttatcatcaaacctatattttgtggtagcctaagtaccttaatttagggatagcatggtagagaaaattttttttttttttgagacacagagtcttgctctgttgcccaggatggagtgcagtggcacaatcgtggctcactgcaacgtctgtctccctggttcaagcaattctcctgcctcagcctccctagtagctgggattacaggcgtgtgccaccgtgcccagataatttttgtatttttagtagagatggggtttcaccatgttgaccaggctggtctcgaactcctgacctcaaatgatcgcctgccttggcctcccaaagtgctgggattacagacgtgagccactgtgcccagccgagaaaaatatttttatataggagctgttccataaatagtaattaaatgaatgaatggataaacagagcataatgtgaaaacagttgcatcaagatcattgagcacagctgtcttatcccctttccaaaactaacatgaaattaactacagtaataacttttaaaaaatacatttgcgataaaaatgccatctactaaccagaaatttgaacaacccctaacatgaagtaaacagacagaattcgattgactgagaaacaaactgggagaagatcacagcccacaaaacgctgggggttgcagcagaggtaggagctgtcgtgaggtttgctccaagcaaaggggacagcaaggaaaagaagagcctcaaagtgagcaatcgtcagcctaggaccagcagaactatatggcccttccctaaagcagcaagtgtagatgctgatagcgggatagcatgccggtacccaagacagctaatgacctcaagaaggaacagagagtccccagtctgagaaggaaagacactggttcccttctggcgtccgttccattgctctctacagcttcttaatgctggctcctgacatgcggatctgcagtgaatgaccaacaaacagcaagtctcaaacactaagatgagtcccagatcagaagatgtcagacatttgaaggaaactgccactgaaggaagcattagattcaccaaacagaaccaagacccaaggaacaaatgaaaatattaaaatatgtgcaattgatgattcattcaatttatgttcaacaaatatttattgagcacttacatttatacacagaagaaccaaagataaaactctaagaaggaaaatttggtatagataaaatcagaaaaacagttaataaaatttgtagatatctaaattattggtggatataattaaaaaagcatgaatctaaaattctaaattatctcaatattccacaggtgggaaagttagaggtggaagcatctaaggataatagataccaattagtttaggctttgatagaaaaatgtaaaagtatattaaaacttcagcaggatattagtataggtaatatatattaaagatgcagcacattaagtacttgaaataagtataaaatttgttgcttgaagacattttatggatgtctgcttacattttactgtataacattttctaaatttcactttttttatagttttctttgtaaattaggtatatttttgaatttgtaaaaagaggaggaaagtgcaaatcaggtagtatgaaagaaattgaagtgatacaattatacatttttgattatttgttcatctattctcatttctttttttctttttttctttttttttttgaggtggactttcactcttgctgcccaggctggaatgcaatggtgcaaattcagctcaccacaaacctccacctcctgggttcaagcgattctcctgcctcagcctcccgagtagttggggttacaggcatgtgccaccatgcccagctaattttgtatttttagtagagacagggtttctccatgttggtcaggctggtcttgagctctcaacctcaggtgatttgcctgcctcggcctcccaaagtgctaggattacagtcgtgagccaccgcccccagctatgtattctcatttcttaaatgatggcttgatctccattcaccccccaaattcttttgcagtttatcttgcctgttaaattctgtttaattttgtcgttcccattactagaaaggagcaagtgaagaggttgacatttcattgttccaagtaatatgagcacccttttaactggaattttttccctatgtaataatgagttgagaattggttcataaaatattatggttttgaaaatgtcagcatggtatcttaatgatctagctttaattataatgacttgttggcatgaacctttggtagtaaagtcttcagaggctgtgtaaagtaaacagttttatatccatgataatgtctaaagacctagaactttaactaaggaatgtatcctctcttgctagtttgggattatgaatacataatggctatttcactttgaagaatgttcaaagtctaatataaaactttttcctctgtggataagatataaatatcacattgaaatttagtattaaaactaatgttacacatatggtaaaaaaaaaaaaaatgttctttgtcctttgctatggttttaaaggaaaagcaggaaaataagaggcaaattcttcccctaaaaattctttaaaattcgaacattcattaataggcatttcgtggaagacatatgaatggccaatgcatgtatgaaaaaatatttaccctcccaaccaccataaggaaatacaaatttaaataacatcttgttgctatcagttgctagtcccttgaaagactttattgataatatcctgtggtgataaggggacaaagaaaatggcattcagatgtattcgtggtctagtgggccatgcccatcggggttcttaggtttagctaaatattcagattgacccacctgtcataagccacatctggcacctgttgctcagaagagaggtagctgggatagccagcatgctggcaggtgttgctcttcagtgggagcctgcgtgacactccacttagttgtccatacaaccatctggaagccaccattcttggtaccccaagatacaactttgctgctaagaagtgggtttgagccttcctggcttgtaagcctcgtgcccccaggagccaatatctatagtaacagctgtactgcatagcttcccagttctctgcaaagaacataccagttataaaagtcattgaacccaggaaggcccaaagatatggtacctattaggtatttatggttttttctctcaagatacaatttatcaattgggttattttttcctaagcaatgatgcttataacactgttgacagtataggttcctaagagaacagagctagaaagttaaccaaaggtcaaattctcatataaaaggaaaaagggtgttttttaaccctttactcataaagaataaatgagcataatctctttttaagatcacatttggacagtaaacattgaaaacttttattgtgtgtgtaccctttcaagctggcaattttgttttcatggctttattgtaacaaatacgaaatatgcacaaagatgtgtctgtgtctatatgtaagtaggtttattaagcattatttgccatagttattaattaataacaatctaaatgctcagcacttgcttaagaaaattatagtacattcatattctagaataatatatacgtttataaaataggtatgtccagaaacaactttaaaagaacatatataccaaaatatttagtgtgtaactgagtggtgattttctgtgtaattttttaaaccataagccactaattttttactttgatcatgtattacttttctaaataattgctcttcataaaaattaccagaaaattggccagacacgatggctcatgcctataattccagcactttgggtggcagaggtgggtggtcaggagttcgagaccagcctagccaacatggtgaaaccccgtctctactaaaaaaaaatacaaaaagtagacgggctctgtggcatgcacctgtaatcccagctagttgggaagctgaggcaggagaatcgcttgaacccagaaggtggaggttgcagtgggtcgagatcacgccattgcactccagcctgggcgacagagcaagactctgtctcaaccaaaaaaaaaaaaaaaaaatcagaaaattattgtcagttttaatgcaagctacttacattaaatgactaatcatacattttaagagtttgttttaataccattaaaaaagcttgatcttgaactttcttaatgcatttaatgaaattctatgttctataaactatggagcttcatctcacatcaacatctgaagtgataattttgaagtatttcaagccataaaaatcattcagttcactttctcatatatactattacttgaaactatgactcagtgataaaagtggggaaagcacatatattttttatagaatttagatgccagctctcaagttcttttctcaggttatgggtaggttaatggatgccatcattactaccttatggatttgtttttaaatacatccaatttattctccatcttccacttgggtaatatacacacatcatagtttaacattacctcacccactgatagtcttgccactctatttattggtttagaaaatgtaaaacaaatatttcctcaaggggtatgtggtacttggaggaatattaaaaagcaaaatataattcatgctgtaccttcaataaaataagaattatgtgaggaatattcaaagaaatgtttattgcatttgttacctgctgttttgtattagctgtgtttcttgttctccatacaaatggatgatgcagagttagctggctctgtagaagtgctgtagaagtggattacagtagaagaccagtctttgggacacagattggaattctgatcctggcctcaccaagtactctgttacccagagactcagtttcctcatttacaaaatgaatagactagatatctcttaggtcttttcaactgaaaaaactattaagaattatgtaatttataacattaagacttatgatgataaaatttctgataattttgtgtttttttctttcagtttgtatctgttcaaactaggaatagcaccccagatccaggatttgttgggcaaagtagacttcacaggtactactctttatctttgtaattttttacaatctagttataaaaagtaccaatacctggccgggcgtggtggctcatgcctgtaatcccagcactttgggaggccgaggcgggcggatcacaaggtcaggagatcgagaccatcctgactaacagtgaaaccccgtctctactaaaaaatacaaaaaattagccgggcgtggtggggggctcctgtagtcccagctacttgggaggctgaggcaggagaatggcgtgaacctgggaggcggagcttgcagtgagctgagattgtgccactgcactccagcctggacgacagagcgagactctgcctcaaaaaaaaaaaaaaaaaaaaattaccaataccttttttccccattttgatattattgatttcccttattcctgtatattgatgagaagagaaaacagacctatcttgtttgttcttgactgagttctccttctccatgtttgtgaaatgagaaacttgggctaggttcttcctaaggctcttgtttacaaacaaccccacttcctgatgaagacatttcttgatatgattgtactcattcctgcatccatctctgtctgtagctttctctgataatgattatgattattttgttctttgttagaggaggaaatcagtaatatgagaaaagaacttgagaaatatggaatacagatgccatctttcagcaaaataggtggtattctggccaatgaactgtccgtggatgaagctgcatgtaagtccattcaaaatccaaacttgccatggatgtgagacttacctgtactttacctattgattttgattactcgaaatagaatatttagaagatactttaagcaccctaaaagtttttattatttgttttatagatgattaatttgaggatgtcagaatataaccaagtaattgattttggtctttagacttctacttgtacaacatgaattgaggttctagaaataccttcattgtccatagttctctactttctgtgtctgtagattttagtggtagagttcattgttacaggtcttttagtattgcaagctaaattgcaagtatttcttggaaccaacatgttactttaaaattacccatgtcgccctgaccagagggcaaggattgacttaccttctaactcctgtggttgacatagggcttgcttcattttagccattcagtgatgtataaatgagtcagaattacttaacagatgctgagatcaggaccaaagacagccatgtggagaggttgtcaggtgctccataatatgtctcagttctctttttgacatatttactggaagccaagaaagaaagtaaaactgcttgagtttacacagggtcaatgcaactgtccatgttgtcttttgctgataaaaacctttttctctctctctctttactttttagtacatgctgcagttatagccattaatgaagcagttgaaaaaggaatagcagagcaaaccgttgtaacactaagaaacccaaatgcggttttaactttagtggatgacaaccttgcaccagaatatcagaaagaactctgggatgccaaaaagaaaaaagaggaaaatgcaagactgaaggtgcttagattctgagtaataaaaacagtaatgaatgtgcttatgagttactagtttgaaaagccttaatgttgaaagcaatacttttaaatcaattggctattttctctatagccgtagacaattgatttgaatgaaatgtagcatacaagaggaccatacactaggtaaggcaattagattatatccctatataaggcataaaaaggaattttatagtccaggcatggtggctcatgcctataatcccagcactttgggaggctgcagcgggagggtcctttgagtccaggagttcaaaacgagcctgcgcgctatagtgagaccctgtctctaagaaaataaaaataaaaataaaaaattagctgggcttggtggtgcaagcctgtagtcccaactactcgggaggctgaggtaggagaatcacttgagcctgggaggttgaggctgcagtgagctgtgaccctgccactgcactccagcctgggcaacagactgagaccctctctcaatttttagaaagggaattttgtgatggatgttatatattgacagaattaaaagtcatgttgcaaacttactaatgtccccaggaagtgtagaagtagcaactcatgatcatcccttgttagacatcaacagaccttacattagccaagttacttttacatttggtagtagaggttaataattcagtgtggtgaagttcagagaggatgtttttgaatctacagtcttcatattttcccaatagtcaatcctttatatttgaggatgtccctcctgtacaagacagcctgctcctaatcgtaactccatttgtaaccacctttctgtgtagtccattattgaaaaatttgtctacgctgagagcttctacttcctcaccagcttgtctctcattaagctcttgccatgtcagtttcagctccatgactgaaagtaaccactttaggttttggcattttctcaactggtggcttccaccagcatctggcagggttggcctcctaccttgagattctctgcttcactagcttatgtgcgtccttgctgccacagttctcctctgtgcctctttctcctcttccttctccctctcagtatggggattcttcaaggtctgacatggaatcccttctctgttcttcttccattgagctcatccacttgttgaagaaatcagccatcagctttatgccagcccatcccaaattggcctctctcctccttctccagataactttgtctgtgtccctctggctttgtaccccattatatcagaagagttccccttgctgacttccctggttcagaatgatggccgggtttgtctcagaactctttttatgccccctgtgtcccatgcattgctagattctgctgcctactcttgttggagttgaatctgtcgccaaccttctagtctcaccagtcttgcctcagtcctgccccttctgacctcattgcatgactcttctatcaagcaccttccttgtgggtctctctgcctcctgttactctctaagccaatccctcttaaagctagaggttacaaaactgatctttaactacaaatcttgtgttaacccaccagagacatgccccgattctctattacctactgaattaaataccaaatcttagcttagccttcagctgaccccctcatctttttggctcaccatggacacactccaagctgtagcctaatgtgctaagctttccatctgtgtaaccaaatcctgctgtctgtttcctattcttgacattattctgttgctcgaagccctcattgattatgatctctttgcaaaattttcttcccaactaagtatgaatactttcttaaaaaatgcttatagtacttctcttatagaacctattctgttcttctaggtatatttattacttgtgttcttgattttattagatcaaatcaaatgaaattggcactattcaactgtttttgatctaaaaaaagggcaataccaagtggtccaaactaatgttttccacatttgaaaattagcccttttcaaagagtcaccgggtctgtcattcatctttgtagtctttgccagcattctcccctagtcccctgcacagagcaggcactccacaaatgcttgcaatgaatttaaataattagggaatggtttttgtcactcttcacatttttccatttgaatttcgagttttggaaatattttatttaacctcagaaatcagtgaagactttgttttgcagaatagctgtatttcagaagaagaaagagatgcttatgaagaactgctgacacaagcagaaatccaaggcaatattaataaagtcaacagtaagtaatggatcgtatgaaggaaattgatatttccgtaagatacagactttccttgccagaatcccaacacaactctcaatttgtatacttggaaaactgccttatacaatgaaaaatctactcagtgtcagtgttgctcttaattatggtgcagcatttggcagtttcccactgggctttttttggtgatctcagtccacacaaagtatcctgaagctagtttgattctaccttcctgtttcattacattccacattttaattctgtcacttttggggctaatactgaaggtcatttagtaaaagattataatttacagattgtagttgcttgcccatgattatgcgatgatgttctattggaattgtaaaaggtactattgacaccactgctctctgtgacttcccagccattagtctgttgtttgtaagatttttcttacacttgtgtaactttggtgccagtgaatgggactatggacaggccagatgaaatctcatgatggcagctttgagtcccacacccctgagcctctgtggagtcaagcagatgagttcctcttagtacctggctcaagtgtctgattgtaaagaacagcagactcaggtaattaaaataagcgtatgcaggttgagatacatcaatttttttattagtcttttctcccctctggcaaaacctatttttacttgagcatcagaagagtcagtaagaaatttcatttgatgtttatttttccctggtcaatctagataatccatatatacccaaaaaactaatacatgaaaggccatttagcctgcttaataaagcatgtgaactccctgcgaaattaaaatttggagtatccactaattacaacagtcctaaaccttgccttccttttaacatcctcgttgagttttgaatattcttttttgcttgtaactcttgcaaagaagtgtacacccacggtgttactaagaagtctgctcctaaattgctggagagaaatatcctaaggggctcaaacagtaattaaggaaagccccagagggttaatgtaaatgtctaggagttaacaactgaatgtgtttgagaatatgcctcacatacacataactgggctgaaaactctcaattgcctttatttttttaaggtaacaccttaacattttagggtgcatgtgcctgttgttttattcttgtgaaatcttgaacatgttactgatgatacatgaagtacaatttaaagtttgtctttttgctctatgcgaaagctgagaacttcgtgatgcttgacagaaatgaattacaggaggaaattaatgttgccagtgagacatctgaggtccataagcctagagaggaaatggctccatagcctttaaccatcctttatttttgaaatatttataaccatgaaaacagttttctttttcatgttaaataaaatgctttatataaatgttttagttctttactcagtgccataatttcctgaccgcaaatttaatgccaaattggctatactttttttttccatttttaagtaaaaggcattggatgttttgcactaatggtaaaaccggctgaaaatatgaaagcaaggtttgatggctttaaatgtgtagaacatgattattctgaagtctttttatctctccccatcttaaaatttatagtccagtagaactgaaagtaaccttaggaaaaaaaccctcattttgatgacatgacaatgagacaattgtacactttaaaatacgtaagaatcagctgggtgcagtggctcacacctgtaatcccagcactttgggaggctgaaatgggtggatcacgaggtcaagcgttcaagaccaccctagctaatatagtgaaaccctgtctctactaaaaatacaaaaagtcagccaggcgtggtggcgggcatctgtaatcccagctacttgggaggctgagacaggagaatcacttgaatgtgggaggtggaggatgcagtgagctgagattgcgccactacactccagcctggatgatagtgtgagactccatctcaaaaaaaatttaaaaaaaaaaagtaagaatcattactttgacaagattttcctcaaccatgtaggttattatattaaaatgttaaggcatccacattcatagcaaccatagtaatagcatcagtgacaatgttggtggtaatgtcaacagatctgttgttagaggcctcagctttgttcacattataaccctttacctttcaggttcagcaaatgcattccattcattgcatgatattttctgttaagatcagagctggacattttgcatttctttgcttttttttttttttttttttttttttttccggacagggtcttattctattgcccagtctggtgttaaactcttgggctcaagtgatcctccttcctcagcctcccaaaatgctaggattacagacaaaagctaccacaccctgcctggacatttcgttaaatgcagagtgtaaaagagtggttgatcttaccttatttttttagaagaaattgtttatttaatagtgtttttcaggctaggtgcagtgactcatgcctgtaatctagcactttgggaggctgaggtgggaggatgacttcaggccaggagttcaagaccagcctgggcaacaaagagagactcagtctttacaaaaaaaatttaaaaattagccgggtgtggtggcacacaactgtagccccagatactgtagagactgaggtcggaggatctccagagcccaggaggtcgagactgcagtaagccaagattgcaccactgcactccagccttggcaacagagcaagactgtctcaaaaaaagaaagagagagagagagagagagagagagagagaaaacagtgttttaaagacatgattttctgatgtttgaaatatagctgtacaaacccatataataaatttatcaaaggtaaagcaagatcctacctagagtaatccgagatacagctgaaaggccttggagtaactttagcagaacagcaaataccacaaacaaccactagccttcctttctgaaattttttggtttgtcacattaattttaaagatagaaatgctaaggttctcagggtcctttaggttaagtgtgagttttctgggggatgacttgaaggattccattaatcataagtatttcctgttattgaattatatctcttagtaaaaatattgagggaagatcctcgtgaatgtatttagagaagataaattgtcatcttgtcaaaaagggttagaagaatcttagctgcaatctagtcacgaattaggcagacaggctaacccttgaaaggctctaaaaatgtatgggtatgtgttacttctgctacccagatgccttctctataaggcaaaactctgcaatctctgtctgatttgctctttcctggtggcagagttcatcattcattctcccatttactcagcaatttcatttttgttctctgaaaactatgctgaatctactgttccaagcatctcagtttggtaaccaaaattcatttctttataatctgcaccttacaactggttgagagatcacagagtgtattagtccattctcacactgctataaagaactgcttgagactgggtaatttatgaagaaaagaggcttaattgactcagagttctgcatgtctgaaggaggcctcaggaaacttacgatcatggcagaaggtgatggggaagccaggcacatcttcacatgcccaaagcaggaggaatagagagaagggggaagcgttacacacttaaccgtatctcgtgagaactcactatcatccagggggaaatccgcccccatgttacaatcatcttccaccagatccctcctccaacattggggattataattcaacataagatttgggtggggacacagagccaaaccatatcacagagtttatggttgtctcagatgttgcagcaatatgtccgagtgcttgctgtaggcttaccgcagtgcttatgtgttaggaagatataacagtagggcaaggcttgcttctggtcttcttgtcacttgaagtctccttggggagacagtactaatgcacaaggagcacagggaacatgcctgctggaactacatggcccagctttaaataactatggtgttcacatgatgagaaatccttaaggactggagcaatctgaaggcttcagggaagaaatgagaccagagctggtcctataaggaaggattttggaaggaagtcatgctactcaggaatgatctcataccctaagctccatcaatgctaaggttcttgtaggcactaattccaaagattggattagtttgaattactgagataacattttcaaagccttacctaccctctgcctgcagcttttcagagttcatgaaaagtaactgcttaggttcaaatccttgggaagaagggctggttgggtgagactgcagtggaaagagcaaccattctgacaaaacatgaacccccatcctcagggcaggctgcagtggaccatatcaatgctgtcattccggaaggtgaccccgagaatacgctgcttgcactgaagaaaccagaggcccagctgcctgctgtttatccctttgctgctgccatgtatcagaacgaacttttcaacctccagaaacagaacaccatggtaagtcagaggagaccccagctgtggggacggtaaccctgcgtgccatggcgcactagggaagcctagttaggaaaggggaatagggatcggggatctctaatttgtaccagtcctggtctcactggcccacctgtaccaattccaaggccttcttccttgttaattcttgcttttagtctacataaagaatctaagagcatagttaggaaattccagcagtggtctatacatatacctgtgaaaataggttgttcttattttctgtgtgatatttgaagacaccttggataaattttagctataccgatgtggtattttttttacaatatataatgtttttatgtagaaaataagctcaatctgcaattttagaaactgcaaataagaccattagcaccatggctttgatttttgtgaacttgtgcaccttaatatgacaacagcattcaacaataatttcatacaaggttacagtaattaagaacatgtttactaacactcttgtaagccaaacaatgaaacaaaatgaaaactactgaaagcagaaccaagaattcagcatataacaaggctcgtatttcaagaaggtggggaaacaactatttaataaatgatatccttgcaagtgtttaagctttgttaagaaaacattaactcactacacatatatcaaaataaattttcaacataaaatgttaaatataaaaaataatttaacaaattaaagttctaaggaaaaacacaggacagtcattggatctttaaagtcacaatcagcacttatccacacacaataaagagaggccaaaaacatgagcaggcaattcataaaacaagaactatacaaatgacaaacaaaaaaaaagtttaaactcaatcagaagtaaaaaatatataaattaaaacacagtacacttatgatttaaaattagattggtaaagattagaaagatttaacccagcgtagggatagatatggggcccaaacatctcctacacagctgctgggagtatgaattatacagattttctgcagggtggtcttagtaatacagatcaaaagcccatgatgctgacagttacgttctagaaaataagcctgaaggatatgaaccaaatagctttggccacagagatgtttcacagcattgtttagaatactgaaaaccaggaaacaaatgtttaattaataacagattgcctataaattaataacatttatggtgcttgtacatgtgagaaatatgtgcaaccagtaaaaatgataatgtaaagaatgactggaaaagatatccatactaatattaagtgggaaaaataagattaagatatatagcattatcttgttttttgcaaaaagaaagtgaagtcagttataaagacaaaacctctgcaaatgtatatatgaatttaaaatacataaaaggatatacacaaaagagcttgagtggtagcatttgttttcttattcttgcttactaagacttctgtattggctgagtgtggtagttcctgtctgtaatcttagcactttgggaggctgagacaggaggatcacttgaggccaggagttcaagaccaacctgggcaacataggcctcatctttacaaaaataataataataattaaaaagactccctatgtttcctaaatagaaatatagtatttgtaataaaagaaaaatagcttattttcttaatttcattcaggttctctcattaatattttcttccacttctctggctctgaagctcaaggctacttatgcttgaggacactcattcatcctcaactggccatagttaacctgtggctgtccaacctcatttcttcttcctctctccttatcctttttgctgtaaaccaatttaggtatccacggacaggtcactgaaagagatagaggaggtgaattataaacgattccattctgctcttataatttgatactttgtatgttaaacttgtatttaatgtaatatatttaaataaaatttacttacatgctctcgatggtaaccccttcttcccatttgctttgaaagattaaactatccctttttattctgaaatcagtttgctgcgagacttctgtggagatccagaaagatataataatgcattttaagatgaacattatgttatatattaaatacctgtaatatcctaaatgtaaaatatgtatcagcttttccttagtggttctttttcatgctcctgctccttatgtcccttcaatatgatgaaaaaaatattccttttgaagttgggccaagataatataaaatggttaaatggaagaagatattaaaggggaagggtgttctgaaatctaagacgtatttttttggataagctaaatccagattttaaatcatataaacctggagatctggccaggtgtggtgattcatgcctgtaatcccagcactttgggaggctgaggcagaagaatcgcttgaacctgggaggcggaggctgcagtgagcctagatcgtgccattgcaccccagcctgggcaacaagagccaaactccatctcaaaaaataataataataaaaataaagcaaaccaaaccaaacaaaaaaacctggagagctttacttgctttaccaaaagatcacctcagatttcttcaaatatcttgacctggtagtgtattttaaaatttctattttaaaatttatgaaaatgtcactttaactttttttgaattaaatcagtagtcttggtttgaagaccttgctttgtgcttcagattataacttttcagtgaaattctcccaaccttcccttaacccttaattcaaactggaaatcgttagctgtgctaaaatgttacctggcactctcagtcagtgacaatgttatctagtccttggcttaattatatggctggactgagcctttaagcaaccagtatagctaggagtagggatcagcaatgggaatgcagatatttgtggaatcgtaacttttcattgtaatcaacccagtcccaaaaaatgatcatctaatgaaagcccaggagccatatacctgttcttaaagccagtggaaagcaggtggccacgactcctctttctgctgagctatcaagttctttgactttttgttgtttgttgaaatgtgcattgtaaacctccatcatgcacatgaggtgtgttgtgtggggagcttatgttgccatatgttttccaacagaactacttggcccacgaggagcttttgattgctgtggaaatgttgtctgctgttgctttactaaaccaggccttggaaagcaacgatcttgtgtctgtgcagaatcaactcagaagccccgcaataggcttaaacaatctggacaaggcatatgtggaacggtaaggaacattttccaaaccttctttcaatgcagaaatgcatgtttggcagatcttaaaagtgaggaatttgcctgttggtggagaaatccatataccatgctcatgtttcttgaaaactagtctgttttaagagtccttctaattagtatccttgtttacagtattccttctggggaacaagaagaatcagaaagtgatcatcctgtggcaattaataaatgactttgtcgttggcaaagattatttgataggctgaaaataaaggaactattggaaacatacctttccttgggcgtcttttggaaaccgcagaatgtagaagagttggaagcaactttaataatcatccagtccaattcttttatgtcactgatgcagaaacagaatccgggttatggacctaaaattgggcagttgggccccaaactccactcttctgattattaagccaaagaaatcctgagaccacagtgggtcatggcagtgggtaacaacatccatttatctttcatttcatgtttctgaagtgtgctaccagatagtacaactgatagcattgttataaaacactatagcggatcttgagagaaaatcaaatggccagaattgggagccagatgagagagtcgctgagataaaagccccagttaaaatgagtgaatcttggattcttgtaaccaccagggggagatgtctgcacagatcttgacaaaagctcttttcagctactgattttggaacggctctaataggcaggttggctaattctcttgggtcatgtacagttgccaaggaaaaaccagagatttcttaggttaaacaaatggtatttgaccacttgtctatgtagtgaatggccaaaaggtaatggaaggatggtgggttttccttgtttttagtctttttggagaaactaattctcttgttctacttaaatttggccatctggttcatatgactccttagagtgtgtttccaaggtaatttatatctaccaccactgtttctgttacttgttaatggcaccattctctcctgtaagcttagaaacctgaagcccaatttgagtttccctctgccctcagccgggcaccctcgtgctctaaagagcctgctgtcagtagccagtctatgtgccttatacctctgcaagatgtttccatttccctgcaaccaccctcacttagacttctcacttttgcttctgtagtaacccctaaattggtcatcctacttcttttctctccccattcattaatcattcctacctaaccaggctttgccatactttctcagtgctagagtagaagacagacccggtcaatcccttatgaagcttacaggctaatggggcatcttggtgagataactgtcaagactattccacatatttagcatccctggcaactgtcctccacatgacattagcccctgactcacccattctgattatcaaaaatgcctgcttcttcatttacaaatacccttaaagaagtggtcccattctatttgaaaaccatattcatacctgtagtttccagctgggacctacagatggagcctcacagttcgagtgttctgtgtgaagaacttttaaaatgttttgattttttttttttaatttaaatacattctggatctggaagacccagtactgacatgggatttaagggcccacttgggttcttgtattgacacttgtattggccccaaatgatcttctacagccttggcattttacttccaaagtcagcatcttaacttgggatcttggaatcccagttttgcagattatcaagtttgagaaacacggctctgtccagggcctctccccatagagtgcaggttcttcatagcacaagtgtgctgtgcatggccaccttgacaaattcatgcaaagtctctccctgttcaccgtggcttctactcttggggctgtgtttgcccagagagattcttttgtctaattctcacaaaagtattgtatgggttaacattagccttgggcatacactgttcccagattaactgttctaaaatgtaaccctattcataattctgtttgattgttccttgttcacatccgaattaagaacagacttctcattctaagcatgttgctctgaccttacctccagctccatccctactcgtattttgtgctttagccaagtccaagtgtactttctggtctctgtgttcctatgcgtggtcctctcaccatcaggaacttggtgcctttacccagctcagctaaacacagtattggagcttctgagccctgcctaccatacattatgttctgtgaggtatatccgtgcttctccccaccctagcatctgatgttatctctcctgggaggtagcatgatgtggttaaaggagcatatgccttggaaccaaaaatatctgagattgaccctccctaactaagcctttttccttcatctataaagcacaaaaacaaaagaaacaaaagccccactctgcatttgcagaactgttttgaggatttagtgtttggttcagtgcctgtcccagggagggtgctccaccaataagggtttccttccacttcttgctttgaaccccattatatctactcttatggactctttaatggtccttcctgtgctctgcttttatacctttttggaatttttgtcgtcttacccactggtctgaaagcataaaggctgcacctttttcctcctaatattcctgtagtgcctgccatgttttacatgtagtaagtgctcacaaacatctgctgaactaaattggattactgatcttctcagagcttcccagggctcttagattagtagactccttactagtctgtccatagatgaggtgaagagaactgagaggagtgagaggagaggacattgacctgtttggggaaactacggaatatttcccaaagttggtaacttcagtactggagagaaatactcaattggaaaagcctgtggagttctcttgtgttactttaaaaaaaatttttttttattattatactttaagttctgggatacatgtgcagaacatgcaggtttgttacataggtatacaagtgccatggtggtttgctgcacccatcaacccaccatctagattaggtatttctcctaatgctattcctcccctagttccccaccccctgacatgcctcggtgtatgttgttgttcccctccctgtgaccacatgttctcattgttcaactcctacttatgagtgggaacatgtgttgtttggtttctgttcctgttagtttgctgagaatgatggtttccagcttcatccatgtccctgcaaaggacatgaactcatcctttttttttatggctgcatagtattccatggtgtatatgtgccacattttctttatccagtctatcattgatggacatttgggttggttccaagtctttgctattgtgaacagtgccgcataaacatacaggtacatgtgcctttatagtagaatgatttataatcatataatgggattactgggtcaaatggtgttacttttaaaatcttttcctttatagcttgtttttgttcatttctaaagaaatgatgggtagttgtatttctttctgtgtttattttttactttctcatttcactcctgttgggtcagcatttagacgttaagtgtatgggatgcccataaggactttgcgcttttggaatggtctccatctgtgagggacactaaccagtgcaagttaccgataatccaaatcgttattgtggtcagtattatttattatacattactagtgtatttcacatctgcacttggcgaggcctcattcagctacagaaaataaattgttaccaccatttcctatttttgaatgtttttctctcaagctactctctatggaagacaccgcatgtcaccttgaagcatgcagaattttgaaaaagtttgtcacaaccaagaaaacagttttagacttcatataatgtttcttcttttaacctctgccattactagatccctagagactattcagaattcaaactgcagagtgactcattatgtacacagaagattgttcttcattgccctggtgcaaagacataaaagcacactaaactatctagttttattaattttcgctggaatagttcatgttagcctatggttgtaacattggttctgtgaaaattggaaagtgggaaaattgataattgagaagtaaaagtttcttaatatatcagtatgagtaagtttttccctgaaatttccccaggcagaaaaaaagtaattggagtggttgactaaactgtatcttccagagggctatgcacagtgagaagggtcattggtcataaacaatgggtgagagggccatttttaattttaattttatttttttatggagacagagtctccctgtgttgcccaagctggtctttaactcctgggctcaaacgatcctctcactcagcctcccaaattgctgggattacaggtgtgagccaccacgccaggcctaagagagatttttgagtattggctaggagcctttggagaaatgggcaggtgaaaaggaatttcagtatatcctggtttaactcatgtgccacctcttcaggacaacatacggtaaagattgtgctactcagcaaggtttctggaactgcatttgcatgttatctgattcctcagtgtcatattaggcctcaaagtggctctatattagggttgtagtagaaaaggtcttttaaaacttagattttggaaggaacaagagaaataatgaaaaggacacttgatgatagaaagattgagacccatagtaactctgaattttgccctgtaacaatcatctgaagactgagaagaaccaagacatacaaaggggaggaaaattagtaactagggaaaagtaatttcacagacttgaaagtttccagttttgcttgagttaggtatgagtttcgattttgaagagctttcattaacagaatttgttcataaaaatactttaagaaaacaccattagtacaagtaagcctggtatatgttgacagagctacacaagacaattttatttgcctttctactctttgtctaacttcataacaactatgtttgaccatgtgtcatagttgagaaacaacaggaacgaagaatgaatgtctctaattaacatcaagattattttctcttccacagttatgcaaacacactactctctgttaaactagaagttttatcccaagggcaagataacttaagctggaatgaaattcagaattgtattgatatggttaatgctcaaattcaagaagaaaatgaccgtaagtataagacactttccttctctagcatagtgggagaagaaggtatctggacaacttagttttctagattagggctttaagtttttgctcaaggaactttgtgagagcaaactccgctaatatgcatacctttatttataggtagattttatgcctataccactgtaccaatatgttataaacgttacaaagcctacacaagaattcataatataataaaatacacaagtaaaaggcctgatttttctggttatttgtacttcagagacagctaaatacagagacagctaaataactcatatttttaagcacccaattttattttgaccttttatttgggcatctttttttctgaaatatgacacgatttttctgccccacaaatggaggaattggaacacgatctaactgttgcttaatgatcacaaatcatggtgatttgctgtgtttctagaaattatgagctgccagcatgaaagcataccaacctcaggaagatatgccctgaaacatgctttcttgaatgtcagcttgctgctttatcatttgcatcttgcttatgaaaatagagtgaagaatgaggagctatgtagcttctgcagtccatacattcactgcttttctgtagtatgcattaccaaattcaagcttcgagctgtgttttccaccatgaaaacaaagcaacaccatcttctgtggcttatgagcttttgacttgtcagcaacagtgggtgagtgttgctaaaatcattgatctctcctccaccttccagctttgacttttctaactcatttgctccaagctcgcggatagagtgggcagatacttctctcacagtttattatgttttattttagtgtgtttgggtaaggtcttaggtctggtcttctaatgctgtatttaacttaggaatactaagatcactcttgaaataaaacatatgactttgttaattaattgcatttgcaaagttttcttctttttctttgctgtttcctgtgagtgctgggccaaaagtcaaggccagttttggttcttgttttttaaacatattctcactttaagcccctactataaaacaggatccaggtgtgctaccctatatacggtaccatggatgtaccactgttacactgatccctggacactttcattttgtccttttcaagttgtgcacaaatctaaatttctttcgagacggcacagcttccctgttgcctctgcatttcctttcagtgaagcatttaaagtctctgcggtgagacggcttgctcacaccccacttagctcttttctgatacttggcttgggagtttatggttcttgccagacgttagtcaagacgcaagctctaatttgagcagatgttcaacatcatcaggtgggggttgggggaccaccactgctcctagtgtcccgctacagagctcagtcccccaggcttctgcccttctccacaacctccgtcttaatgctctgaatctcctttagcagtggtttggttgctacagcaactgccacccaagaagtaggactcctttcttttggtaggcaaaacaaagactcacgtcccatctttgctttctaactttttccccaattcttggcaatacccatgcttcagttctgctttggttatttctgtatgtgctgcttacacaaatgaaggtatgttagttctcagtgctgaaagattgtagggttgacattgattaacagggggaaaatgccagttttgttcttggctatcaagtacagcctttgctttagttggttactggggggaaaaaaagcaagtaacatttgcataacttagaaaatagtcttttgtaagtagatattatttttaagcaaaaatctcatttgattgctgtggcttttatctatcaaggtaacagcactactaagttattctccctaggacatttcacacagccactataacacttctgttaagtatcttgtcataaaggacatataccataaccagaaaaggtatttcagacactaatatttcctttctggaatttgggaactttaatacagagtatttaatttatctgtgtcttggttttatttttttcttttgtcagaatgagttcctgaagtattgagtttgatatcatgtttaggcaattcttcaaaatctaaaatttctaaaatacaccattgtaaccaggcaggaattgctcagtatagtaattaagtcatctgaggagctgagaatttttcatggacgttttgaaggtgcattactcttgcctccccaccttattcttgccacatgctctgagatctaattccatatctgagttgtgatgtgggtgaggtaagcagctaatggaaaatgagaaatatagaaggtgaatttaatggagaagctagctgctgaatgcatttcctcaggctctgttgatttcttactgaaaagtttacttttcccagtagaaccataaaggagcattattttaaccttatagcctacatcaggaagttttcttctttgagtttttgctctttaaatttggtaggtacaattctgtgtaggttacctcatctgctgcctcaaatacatgaactctaaaagaacgcccactctcttgtggactagaatgttatagtaacatgtgttgatgtaaagaagtggaccgtgggctgagtgaagctcagcaatctttcttcaaataggatttcccttttatttataaacagaggaagtgatgcatatgttcccagagggcttctgggtaatctttcagctcctatgatgtcattcactatgacctcagcagcttgtattcttagaaacgcagcagacagcaactttagcaggtgatttcaatcaagtcagctgaaatgcactcacttccaggtgatcggccttggttctgttaagaccatttttggatggggtgttttaaaggtatttagaacagcttacccaaggggggtgaccagagaatggcactaaatattccatgcactccagtttataaatcctatagggtaaaacgacagtaccttgtatatagataatacttagactttccagagttctgtcaatgtttacagataatataacctgcacattagagaaatacttctgctttttcttcaaacatatttaagtattatagtctggaatgatttctaggagttttagatggtttcattcttcttacaggtaaatcttttcattcttaacgaagtggtggttatgggctcatctattcaagaaatatttagctaaatattttatctttacttgaatgtcaagctggagatactttttttaaaaatgagaagtactcattctatttcatggcatatcacagttgtgaagtgacgggtgatcattttagattaaatctaatggaaaaaatgagaaatatgaagtttgaccttaaaaatgcttatattctaagcttattgttcattaatatctagtttctttaacagttcttatccatcagtactaacctaggaagcaaaagctccttggcagtgtgtgtatatgtgtgttttatatatatatgtgtgtgtgtgtgtgtgtgtgtgtctgtgtgtgcatgtctatctaaatgcatttttttatgaatggatgatagtttattttttaataataaggtattgagaagtaacctccagatagatccgtttcattagaattgtaaaagcaggtttcatagtttgacttctgtgcttttcatttgtgaaccctatagtcagtcttgttctctctttctctctctctctctctctctctctctatatatatatatatatatatatatatatatatatatatttttttttttttttttttttttttttttggtggggggaacagagtcttactctgtcacccaggctagagtgcagtggtgcaatcttggctcactgcaacctctgcctcctggattcaagtgattctcctacctcagcctcccaagtagctgggacttgaatagacacttcatttctttaaagatgatgtacaaagggaaaataaacacatgaaaagatgctcaaaatcattagtcactagaaaaatacaaatccaaaccacagtatgataccacttcacacccactaggatggctgtaatgaaaaagacaataacaagtgttggtcagaatgtagagagctactcaggaggctgaggcacaagaatcacttgaacacaggaggcggaggtggcagtgagccaagatcatgccacagcactccagcctgggggacagagcaagaatctctcaaaaaaaaaaaataaaaataaaaaccagcagctgggaccttgatagaagttgcattgaatctgtaggtcaatttaagaagtatttccatcttaacaatactaaatcttccaattcatgaacattggctcttttcatttatttgtctttaagttttttcccatggtgttgtatagttttcagtgtacatgtcttatgtttctttcattaaattatgtctaaatatttatttataattataatgtatttgtagttgcagtcttatgaattgaatgtgttcttaattttattttcagattgcttattatgagcgtatagacacataattggttttgtgcttgcatcttgcatcctatagccttgctgtactagttaattagccttttgcaatcggtgatactaaagaagttataatgtactgtgacttaaaaggaaaactacttcttcattttctaggagttgtagctgtagggtacatcaatgaagctattgatgaagggaatcctttgaggactttagaaactttgctcctacctactgcgaatattagtgatgtggacccagcccatgcccagcactaccaggatgttttataccatgctaaatcacagaaactcggagtaagttttagtatatctgtttcttttaaattttacaggctgggtggcagagggagagaaggaggaggatttgacccatttacgttaaatctcatgagcttcttgtcccaacaattacccatgaatcagaatggaaataatagagctgttattttcctggtaacaaacattggggggaaaccagctccagagctatttattgctttaattctttgactaaaaactcagttgtaggtgagttcttgttcagagttcaattcattgactatttccttagtagatactatgtgcacacttcagtccatagcttctggtagagaagatggggatacagagggacacataataccatttgaatgttctctgaccttatcttcaaaatgcttagaaactgattgaggcagtggacattgtcacatggaacagtcaagtaatagtaaagataagggtgtgcaaagtgtcaaaatgagagatacacagattgattcacggatgtttgagattgtcggggactagaatcctaagagaagttggtgtggaggtagagcagaagctgtcctctcgaagactagtggctttttctgagtacagagcttgtaccgctattataaggagccccacaaagactggcctctgtgataaggccaatgggctgagtggtgaggctgatatgatctgtcacctaagagtgggagtgatgccacctgggacctagctacttatggctgccatgtcttcaggtgcaaacccaactgaaagggcggtcatctcctctgtctaggtctttagaacctaggaactgcctcattcgaaacaggaaaaacatccttggttaatgcaaacatttattgagaacctactatttgtcaggcatgatattagatactcatgtgtatcatctcatttaatcatcacaacaattcataacagccttctgaaccattttgccatcattattgccatcttacacataatgaaaccaagattaagtaacttgttgaaagctatctaaaatgtgaccgggcacagtagctcacacctgtaatcccagcatttcgggaggccaaggcaggtggatcacttgaggccaggagttcgagaccagcctggcaaacatggtgaaaccccatctctgctaaaagataaaaataaaaaataaaaaattagccaggtgtggtggctcacacctataatcccagctacttgggaggttgagggacaagaatctcttgaaccgagaggtagaggttgcagcgagctgagatcgcaccattgcacccccacctgggtgacagagcaaggctctgtctcgaaaataaatacataaaataaaataaaacaaaatcaagctatctaaaagataattagtcctgagactacatgcagctcaggtctgtctgattcggaaacattataattatgtattaaggcagatgggaaaagatgtttattgcagctttgtttgcaatcacaaaacatgaaaaacaacctaaatgttgttaagcaaaaaaaaaatcatgctgtgatgtgcacatagatggaatatagataggcttgtgtatgtgttgggggaggggcgcacacactcttacatgtgtctaaaatatttctggagggaggataccttctggaaggtgaactagaaggctagtatggatgggagatttattcttcactccgtttttgtactgcttggatttttaaattttttaaggagtgtgtgtattaaataattactgtttctaaacttttaaaaaccaatgtaaatcctatcctcactactccactgcctcattgaaggtggagaaatgtatcccccatggtggcgccctctgcactgccagccttccaacaggaacggcagtggcattgcctgaccctcctcactttgccaagcgcccccactcacatcagtctttctcatttaagcctcataccacctgtggaatgggtgctgtctcatctgatgtgaacgagcctgaggctcagggcgaatgcctggccaaggtacagccagtgagtgggagagtgagggctcatacacaagcctggagtccatacatcccaggggcaggagagtgggccttcaccttgatgtttccactgaggtggctgtggccatggcacatggtaaacttacaagcattggaagacaaagttatttgctttgaagatagacatcattcaaatcctggctttgccacaaattagttatgtgatcttggtcaaatcatcaaatctctatatgcttatttttgcatgtataaaattggaataatagtacctgtcttataggattatggtgagggttcaatgagaatatacaatatgtaaatatatatcaatatataactataggtactattaatgaagaatatgtgcacgtgtttgtgtagctatagcatttagcatggagcctggcaccaaaaaaagggcttaaataatgtagctagtattattgtgggcacctatggttgcctcccaagtaaggggcgagtgatgtcagtatcttaaggttcttttttttgtgaggtggagtctcgctcagttacccaggctggagtgccgtggcgccatatcagctcacggaaacctccacctcccaggttcaaccgattctcctgcctcagcctcccgagtagcagggactacaggcacctgccatcaagcccggctaatttttgtattttgtagagacgaggtttcaccatgttttccaggctggtcttgaactcctgacctcaggttatccacctgcctcggcctcccaaagtgctgggattacaggcatgagccaccgcacccggcttcaaggttcttactagacgtagagtctgctgaatttacacaccaaagtcaggatcttctgaggacaaatagagacagacctgggtccctgtctgcccacagccacatgggggtttgtctttgaggtgagcctgactccacaaacccaaggcctttcataggcaggcagtataggtcccttctagactgagcattccaatctagattgagatggaactccacaggcgtcctttgaaagaagcccctgagtgcccacaccatgccagctctgtgtcaggcatcctttctaggtgtggaaacagtagctttcatggtgtgattagagcattgatatggagcctagggatctgggttctagttcaggcgttaaaccactgttagactatagttagaggtttgaaatatactggcaattactaacagatttaaacagatttaaaatactgcaggtccaagcgatgaatcatatttggttaaattcctgtttttaagcagttttctttctctgttcattgactttgaaactttcttttctcagcctgttcttttttcttggaaaaatcctaattctgttgtttggcaatgtctttaatgtctttgtttttcccctctgctttttttttttttttttttttttttttggagacaggatcttgctgtgttgcccaggctggtctcaaactcctgggctcaagtgatcctcccacctcagcctctcaagtagctgggattgtaggcacaagccaccacattcagcatcctctactattttgattcctagaagtttccagttgtgtgtttatgatggtatttctgtgccttgtcttcccaaggtctggccttggaaaataatattagaaaattatattgctggtattatcagtataaagtaaaactgtgccaaaggctacagccattaaaggtcacaatgggtaacatcttcatagaatggctgcccagttttgtcaaaggtggaggacagtaatggaagttggtgaagattctgggtcctctttagcagtatgtcaagtataaccttgtgtagctacaaaattccttttgcctcttggaaagagacttgagtaatggtcatgttgactttaacactttttctatgtctgttcactgggtggtgtgtgctattttacaattgaaggttttgcttgtgaacatatgagttatactccaccaaaaagttctgttttgctccttgtatataccataaaaactgtgtgcttttaacgaatattgctgtattttttccttaggtaaaactgtgttgtaattgatgacttagttttcagaagtcagctccttccatttaagtttctatcttcttgaaacttactttaggtttgtttttcattctcactttagtgtttacctgagttttgctctttgcataaccacacacatattataaagggtcttcatgtggaagctttttacttaagtctgatgaaatagaaaactgtgtacatttaaaaatatgcatttaaaattgttttttattgttttgttgggcagtatgaaatatacagtcaaggcagattcgtacagacttgtaaagtcatctcaggaatcttttatgcttaaagtttcctcagccccatttatattcactactatcattcactctttaccactaatatcttccctgctgtctaatcactaatatcttccctcctgtctaatcactaatgtcttccttcctgtctaatcactgagttaagggaaaaatagtcatttacttacaggaatataatgggtattaataacaaaattccatttccccattaaaagctatgtctaagaaaaaaaatagtggaggcattatttaaaacttctaaatggcctggtgagtatagtcttagtttagcttccttacttttttgtatgcccaacctgaaatgatgtcatcccgtatcatcacagtatgttgctttttcagtacgaagttaatgggctttcctgctgtttaactgctttgagattttaaaaattcattcagccacatagtattcaaagcatggagctgggtgccacaaagacttgggcctggcatcacccagaagctcaaggaaggcagaggatgagcaccttctccattatacttggtacttgattgttcatggaattaaaatttaaatataaatgaactatatataaatgccataataaaaatatacgaaagtgctttggaagtacagataagaaaagtgacacttctagcctgagaatcagggaagaatggtccttcaaggacttgaaaaaatgaacagaattaaggcaaagacgttaggactagcttttcagtctgaggcagagtggagatatagcagagcaagaggtttggttggtgcctatatcataagcaaggtttaatgggaagtgtgattagcaagttagccttgaatgccaggctaaagatttatgatttattatagaaacagtggagttagtggaaatgttttagtgatgtatcctaactgatatctaaggaagattaatctggcaggacttgtgaagtggtggagggtaggctggcagtggagagaatggttagaaggtagaggtggcctggacgtagtggctcatgcctgtagtcccagcactttgggaggctgagataggaagatcactcgagaccaggagttcaagaccagcctgggcaacagtgagactccatctctgcaaaaaataaaaaataaaattagttgggtatggtggtgcatgcctgtagtcttagttacttgggaggctgagacagcaggattgcttgagcccaggagttggaggctgaagtgagctatgatcaggctactgcacttcagccaggtgacgaagcgagacactgtctctattaaaaaaaggaaaaaagaaggcaaaggtgaaactagataaaagaccctggtgagggaccctacaaagatagaatcagttgatgaggcagccaccagcatgagagtcaaaagagaccaaagaataaaaaatgatgtcaaatgtcaaggatggcaataccactcacagaaatagggaagatggtgatttaaagagcttgaagtagcaataaggcaaatggaaatgtcattttccatagagttgtgatatcttttctcctgcattaacatttttaaaatactgataaagtgtttttaaaaattactaatgctggctggctcagtggctcacgcctgtaatccagcactttgggaggctgaggccggaagatcacttgaggtcaggagttcaagaccagcctggtcaacatggtgaaaccccgtctctactaaaaatacaagtatttttagtagctgggcatggtggtgtaatcccagctacttgggaggctgacctgggaggcagaggttgcaatgagccaagatagtgccactgcacgccagtctgggtgataaagtgagactcagtctcaaaaacaaacaaacaaactactaatgcttttgtaatgtttgacctttgaagcatatttcttaggagctcggaaatggagctccttgcactatgcttatgttgttcttgaaaacagacgttctctgtgatggctgtccttgttctctaagatcatttcactattttgtaaggtaagcagtggagtgatttctggtttttgacatgagaaaataaaggaatggatctaagcaactattaagactacccaggcacaaagctatgagatatataaaatataagccatcagtgttgttgtagtagtagttagcatggtgaataataagaataatattgcttggagcaaagcaaatggtaaaaatcacaaggatgaggagactcgccttaacataccacaaccatctatgatcgtatgcattaagtgtccggatgatggctgcatagcagtagatgataagcacaaatggaattaagaatccaaagaatgccaaggagatgaagtaatagagttggaagggagatgaggactcgcaagtgttgtgaacatcatggcaggtggtgatgtctggctgaacaagataatattcctgcttcagtatgaaaaatggcagcatatataagaaaactgttgcccacaccagtccacatgttaccaaggcataggtgtgcttgggcaggccccggtaggtgaaaggatggacgatggccaggtagcggttgatgctgatgcaggcaaggagcagaatggagcagtacatgttgccatagaagatgactgtggtggcccggcacaggacctctccaaatacccagttgttcccattgagatgataagctatcttaaagggcaatgtaacacaaaaaagaaaatctgcaatggccaggttggtgtagaatacagtggtacagatggatctggtcctgaagaaaagcatccacagggtcacagcattggccgggacaccaactacaaacaccaggaggtagatggcaggtatcagtttagtacttaaggagctggtcaggtaccccatggtagcatttttcacatggagatgtgaagcactttcttcagggcacttaatttttacagtaatcgtggctcctgtccagccttccaaggcagaaaaggggaactcttcaaaagaatttgggggagctccacgaaaggtcttaatgggtaaggttggctttgccaagttgtttgtatcattttccatgcctgtaattgaaagaaagtattaacataaatgtatagttcaagagaaaagaaagtgtgtttaattatttgtaaataatttctgtgattgtagaatttaagatcatttttattttaaaaagttattgtagattaggcagtcaacaagcatatatttaatacatatcatatgccccagaacaacactatcttgtgcggaaacaaaaactaaatgatcagtccttgtatgtaaagtgtttataatactattagaagaaacaaaaacagcccatcagaacattataggcatgttgactacaaactatacaggcattcagacaatacttaatagattcagatgtttgagcaaaatgtcaaggaaaagatgaacttgagcaaagactagcaaggttcctaaaaagatggaatttaatgagtaagattctgctggtgatgaatggacagaagcatagtgtgggctatcatgggatctgggaatgccagataagttgatttagcaaatttttattgtacattgatgtgtcagtggtgtaaagttttaaataaaatccatttctatctgtaagtaatgctactcgtggagaagatgcataaaaatgcattgtcttatgcgaataaagtgcagctgagaaaggaaattgaaagagtgggtgacagctaaattcctgaagggcctctaaactgtcctaagaaatcatatgtctattcacagatgatgggattgcacacacaattttgaacagaggaatgaccattgtgttaggcagaatagtagccccccgcaaagattctacctgctaattcctggaacctacaagtatattcctttacctagcaaaagggattttgcagatctaacttagttaaggatcttcttttttttttttttttttttttgagacagtctcactctgtcgcccaggctggagtgcagtggcacgatctcagctcactgcaacctccgcctcccgggttcacgccattctcctgcctcagcctccccagtagctgggactacaagcgcccgccaccaggcctggctaattttttgtatttttttagtagagacagggtttcaccatgttagccaggatggtctcgatctcctgacctcgtgatctgcccgcctcggccacccaaagtgctgggattacaggcgtgagccaccgcgcccggccagttaaggatcttaaaatgagattttcctggattgcctgggtgggtcaaatataatcataacagtccatataaggggaaggtaagagggttgtcaaagtcagagatttgaagatgctatgctgctggctttgaagatggaagaaagggtcataacccaaggaatgcaggcagattctagaagctgaaaaaagcaagatagccgattctctcctagagcctcgagaatgaacacaaccccaccaacagccttgattttaagacctctgatctccagaaatataatctgttattttaagccactcagtttgtaatgatttgatatagcagcagtaggaaacgaatatagccgttattttgacttgtttttaagatgacttaggtaatagtgtagagaacagattggaaaggtaagaaattacaggcaaggggacctgatttggaggctactgtcatcattcatagctcagtgagttactgagctagaacagtggttatggaaaggcagaggcgaacacgtgagactctgatggcggcttaaagggacttggttctgattggctttggggtgcagtgagggagaggcaggaagcaataatgactcaggtttctactctagatgacttggagggagaggatgccattaactgagttggagggagacaaggagacaggatcggggagaagctacaatctgtttttagtctgactgaggatgagttgctggtggaatattagtgtgtaaaatgtccagcaactggttagaagactggatgtgggtccaaaattccaggagcccaaattagaggcatgatttattgtagtctgcatggaggctctcgtttaatttaatgggagtggttgagatggcctagggggagttatgagaagaaagaatccaaaggtggactttaggggtaatgacagattttaagggaagaggaaacaaaggaggaaaaatcggaagatgaaatcggtatgaggacctaagaagttggaaatgaattctttaaaagatagaaacacatcaactatatgctatcaatatttggtgttacttggcatgttgatgttaataatcctaattcctgcaatttcaaaaacaaaatcttaaagctcaaacctgaacatttattattatataactttttgtaaccctttcacatgtatagaaaatagattctcccagatttctaatgttacctttaagatagacttctatgccaaatataaacctcattcttatcgatttaaaatgccagtactgcgccattatgtcttgtcccatggcctcaaaattcctccatattgaatacttgaagttagtgtttagtaacctatgtttcattcagagccagtttctcttcctgctttaatctctagcagttagctcccgggtgaaatggaaaccctccacgtaaacctgagattgcacaagctgaattcacggtgtaaaatagaggaggtgtgtcctagtaactgaggggtatggaggtgatcaggtatcatttaagaaaaggtagattaaagaaaaggaaagaaaaatttgggaggcagcattcttctatgcctgtatttagaggtgatcttagaagctgtgttgtgtgacacacaaacccttctgctcacttttgcattttggaaaagttcttgcatctgacatcacccaaagagaagtgcctttaaagataggcacaaagttagagaatggtgcctgaagagcatgccgtacaagttattagcctgattttaaaaagctgttaaaaccaagtgtttgtccgttttcagaaagtttctgggatttagcaagacatcatgcctccagacatgccaaacagtgcctgtgttttgtggaaaagttgatttgattccattttccgtgagaatgccagatctgggtccacttaaataaggcttttattcctcagagcctggttttccttatgaattgtactcattgttaaatttttttattgtattttaattctttatagaggcttccattgggcataatatttcggaaatgtttttctatccgggaaaaggccttgaagaactaatccaaagagaatgaactccggcctctcaggggtgtccaagggagagaatacagtcatggattcatagtttctgtttctagttgagccagtaaagccccttcctcatccctcttttccatttacctctagagacagaaactaaaaaccatggcttcaggctgctaaaagcctaaaacaaaacaaaaccacaacgaaataaggcaggttggacaagcttgcttcattcttccttcacatttctcccccaccccatggaagaaagcaaattcactgcctctttgtttccttcagaggcccccgttttcacctccatcaaaccctattagcgtcttgaaggaaccacccccgaaaaccttgcttcttttgcaattctgcttctcaacatattggcccatctactcccagaaagagcgtgcacttattatattcataaatcccacatgtgcttactgctaatcaccacagattctcttagagctctctgcaaccgctcagggattccaaatgtgaatttaagcaatgttcctttagaaagcattgatttctgtttttgtttcccttgctatgtccagtctttgcctctcccactcctaacaatgttgactggagtgtgtgacctaacaaagagtaacaggtacagacctatcccaaatttgttatttttggaaaaagcaggaggtttcaggctaacattgtgatgggtaaagtggaaagtacattcaaagttgaataatagtatttgggagaccttatttttaaaattaaaaaatcatatatgagggtagggagaactccccacttaaagtcaaaaaaggtcattcatttcggaaatactgacttattagcattgccagctattgaaagcagatgactttctctttctggcagtattcttgtttctcccatttatgtctcaccaagaggtttaaacacaggatatatattttaatccctagaaaaagtgccatctttgcttaaccagaagagaaattcttacaaacacaaaaacgactttcaaaattgctccctgacttaatcgtagacatctaaaatcttgaatatgccacacatttttaaacatcaggagggaacacttagtctatgaccaggtttgaatagagtgaatgaactatagatgttcatttccatgattctaccttttaataataaagatcaaactgcctttggggtttacagtttgtgtgagatgcaaagaaacctaggttcagttgactcttaatttgtaacagaaacccacatccccatcctaccccctgagaaaattgcttaccactctgacaaaaagtgggcaacagaagcaggaggccagcagctgcaaagatgagggctttcattttgatgacctgagtcccgtctcttaaacgttatgaaatctgtaaaatcatggagcacaatttcacctcagttccatgtgtcagcagcaaatggaagccttggtctgtctgtagaagtttgctctcctgtgccgtgcaggcaggaaacttgccctggtcctccgcagggaaaggatgtaatccactcgatgcttcagtaagcatgactcaggccaagcctctgaacgtgttacgttatccctggagaaaggcatttaactcttacccacccccaacaatctattctgaataggtgctgtaattctcccctagtagatttgcttttaaagaatggcagaaattacacaggcctttacagaactaagccaaaaacagatgttgaacagcagtaagttttgaatctgtcccacatttcatttcttatccgttttaaaaatgcagttccagagtgtaatttctacttaataaattatcctttcctttatcttcccagctatttcaaatcttaatccttaaacactttacataattataaattaatcatggaaaacaaacttttaagaaattcaaattgagcggtgaatcactttgaaaattttccatcaatgtaatattgatttcagtttgtcgtcagtgcctggccagaacctggcttttgagtggtggtggtttttcttcgccgggtgaggatggcgtttgttcaggcttttttttttttttttgccttatcttgatgtgttttgagccattcaataacccttagggtcagataactggaggaacctcccaaacaacgctgttcagttaaactaaaatcatagcacatcatgaaaatgaggactccctttattccatgagtgttggtgaataagtctacaataagatatttttaatagtggtaaaatatacgtaacataaaatttactatcttaaccagtattaagtgtacagttcagtaatgttaaatacattcacattgttgtacaacatataagcttttatgaattgttatattctgtagagtatgacttaatatacagtaaaaaaatgcattataacacatttttctgtagttaataaaacttaaacttgaagcctgaccatcccacagcctgctctttacaaaatgcagcaagaatcagaaaatacaaatttcacatgagacttaaaggctagggatatgctaggaagaaattgatctgcggaaacctttcacatcttgattaaattacattagaccaagatttttacaaaggtcagtgtttaatacttcaactacataatatatggttatacaaactgagatagaatgttattatattgcagaaatataaaacctaaaatattgacaaaggttttttttgtttcattagaacttttctgggagttatctaaattcaggaatttatgacttgatttgcacatggcctagtttctggtcatttaattcatttgtaactcttatgttgaacctggctgtttaactgaagtggaggtgtggccgtcccataaatatactattattttcagtcttctggtgaacaactgaaaaagcagacttggctgggcacagtggctcatgcctgtaatcccagcactttgtaaggctgaggtggggggatcacttgaggtcaggagtttgagaccagcctgaccaacatggtgaaaccccatctctactaaaaatgcaaaaattagctgagcgtggtggcgggcgcctgttatcccagctacttgggaggctgaggcaggagaatagcttgaccctgagaggcggaggttgcagtgagcaagcctgggtgacagagcaacactccatctcaaaaataaaataaataagaaaaagcagactttacattgataagattcagcttttacttttggttttacatttaactctagtaatcgttagttcaatgtttcataatttaaaccgttgacttaaattcatctgatttgtaatttctctcttcagtttggcctataagactaatactttaagctttgaagtaagattgttactgccttctcatctgggtagaaatctgtgtggtgtatcttctacagtgataagttatgaaggaaggcaaatacccttcaaaagaactgagacacataaatgaactcatagagcttagtttttaggttatagctggggagtgttgggttctcttagatcttgtaaacagagaaaaattagctcctgcttccctgtctctttttttcctcctctagtcttcccctttccacccggcttcctgtttgagcctcccccatccattcttgaaagaaatggaaaatcttgctgatgcttcccttgtagtctgccgcatagctagaggtgattgtggaagcaggcaccaacacttccccagaggtctcctttagcccagatgttgcacgatgaaataacagatagtttatctcattttcagagccctttccacatgcattatctcacgttaacctctgaggaaaatagtgttagaagcctgccagaggaaccagtgactatttcctctccttcctgcccccatccatcttaagttttaaatgacggagtcggtgccagatccattacctttcattcatcacagtcttgacttaggatttagaacacgacacttattcctacacataggtaaaatgttcccatttgttaaatgtcacatgtttcctgaaaatatctctgctgataattatttacttgccatctcagaaaagattttataaaacacaattgctacctggaagttccacttaatatctgtcagggctgcttttgtagcaggaccatcagaatcaacccaaagttaaataggaatatttacctataataggaataatgcaatacattttcattgctgctgttgcttcctttctaaagctatctttaactacttagtctttgctccccctgcaacttgacacctttaccataggttaaccctttctcacctatgtctggatcatgtgtctgcagtatatattgccctgatcacattgtattataattctttttcttttttttcttcttttctttttttttttttttttttgtgagacagagtctcactctgtcccaaggctggagttcagtggcctgaccttggcttactgcaacctccacccaccaggttcaagcaatcctcccgccttcctcccaagtagctgggactacaggcatgcaccaccactcctggctaatttttgtatttttagtagagatgaggtttcaccatgttggccaggctggtctcgaactcctgacctcaagtggtccaccaccctcagcctctcaaagtgctgggattacaggtgtaagccaccatgcccagctatatgtcttgacacatctgtctcttacactacattgttaggtccttgaggacaatcaccatgttgttgtttgtttttaatttttgtctctgtgtctgataaatatcgacgatccctgtgtttctctcaaattaaaaatatcccatggtaccctgggacaccttgacacttagtttgggaaccacaataattgattgagggagagagtgtttgactagggtagcccgggaagactttttggagtaggtagcatttgagttgagacctgaatggtaagaaaaagccaacagccacacagtgagggtagagtattgtggtctgaaagagactcgtgtgaaggtctagaacaggaagggggaagtaaacgggtgtgaggtgcagccagagaggcagtaggcagggccatgccgttggagccccgccatccctgagaaggcaccctgtgtttccttctaactgccgggggaagcctttggggaagctttaagtagaggagtggtgcactgagctatctattttgaagggatcctctgggccctctgtagagggccactgtggtgagggcaagcttagatgcagcagaagctgctagggggctgatgcagctgtccagttgggagatgatggggggctggactaaagagtggtggggaagaaggaggaagtggtcgggtttggggtctgcttcattaggagtgtgtacagtatatggcagagctggatagttgctgattaagaatttgtgggaattatgattaaatggctcctcaaaagcagttattaattctgtttcctcatcattcactcttctttctttttattctgtgacattgtccccaggactctgagagtgtttccaaagtgctttggctggatgagatacagcaagccgtcgatgatgccaacgtggacaaggacagagcaaaacaatgtaagccctcacctcctttgctcttgaaacttgcctttttggatttggttatgtgcctgaagtcatgtgatttttaatttctgaaagatttggattcttaccaagttttagttcttggacacataattataccgaaattagttggttgccctattgtcagtgatttgactctatctccaacaaaatgtaacaatgttgctgaacaaaatccagaaggtaaaaaatagtttttaagctctcaaattgtataattgaataaaattctttttttctcttgatttttagagaactagaccatttctacttaataaatgcctttttctcctttccatggcctttatagttaccagggttttccacagaaacagaaccaataggagacctatggagttggctagctgatcatggtgcaactagaagtgaaatagactggcagtctactcaattcttacttaatctgtacaactggatgagttttgggtcaagcaaacagaagtctaccttgaatcataaaaatagtcatggaccctcaatcagttcccagaatggggccagtttacaaacccagaacccctcaaatgaagggaaggccaggccccttgaggaaaaactcagctacactaccaaaaatttatactgttagtctttcttccacccctcccccaaagggacctatggccttttaccagggtgactgtacttaggagaaagtacataatcagacttttgggaattagtggacacttgctctgaactgacactaattccaagaggcccaaaacataactgtggtccaccagtcaatgtaggggtttgtggaggtcaggtgatgaatagaatattagctcagatccatctcacagtgggtccctaaactctttctgtggttacttccccacttctggagtgcataatcggaataggcataatcagcaactggcagaatccccacattggttcaaatgataaaattgtttaaccctctgtttttaaggaagaataacatgaaaattcacatgatagtctgaaatagcttctaaattgctatactaacattctccatatataaattaagattcctaaaaatatatttcactaacctgccaactgatggcataattagaatctattctgttgtatcaggtcagagaaggttcttaagatgactttgtcttactccacagatgggcttttcaacctcggaagcatctgtgagaaacatctgggctttatctccttagcttagaaaaatgtgtgtatttctctaacctgaacttttattccctaaggaactttgaagtctttcctttctagcacgccttaagaaaaaaataatgaagtggaggtgtgtatataagaaatttcaacttaaatataaaactgaaggaagccatggtctgaagagacagttttgagaaagtagattgtaatttagacattcaaatagcctaagatggttatgatttgtctcttagaaatcaaaccaatttagaaggtttttaaaatgttcttatattcattgttcttacattcggcctgcaaatgtcaagttgattctgtttttcacattgagactcatggttctattgactataaaagtaagaggatttctcaaatgtataattttgtactctgtattgcacatctaaaatcctatcttttcactctgtcctgtcccttaaagagccgatatactttcttttactatatcttaaacagcaaaaaagattttccaaagttaatgctacctatgagaattttctgactttcaacaagaatttgattaaaaacattcttcattatttgcatgaagacttgaaatagattctggtcacacactataagcatcacacacactctcagataatatgataaaagaaaatgtgttggcccaaatatgttaccaccagcaaaatttaaaagggcagagtaactcaagtccctttcattttggcctagtgttcacattcactggagtatcttgcttgcttaaagtagatttgcctctacttttgattccttagagcagtctttctctacctttttctcattatggcaccctaaggaatctttttagacagttttttctctaatcactccttaccatgaaattttaatgccacagatattttgtatacctgtttatgtgccatatgtagacctgtactttatacataaagagatttttttcactccctccctgcaggaactaatttttgccccgttaggggttctatcacctccactgtgaatgtgtgccttaagagagcctgctggtatatggcttaagatgtaaagcaaacattttttggatctcttaggagatttatggaggtttcttaatttgttccttggcagaaacatacctgactttctggagtgaaagtcatctatctgatatcttcaactatctggaacttagctacaactcacagattaagaaaaaaagcaatcaaaatagatatctcaaagcaagcgcattgaagttaatctactttattcactgagcacccctcagatagacactttgagcctgttgattcttttcttaggcaaaactctattatcttggtagtttcttttcctggttggttgtgacttagagcacatcagaagccacaagtcacaaggcagtaaagtgcttaagctgccataggcaggcacaccaatgtcagtaaaaagtgacagctgacagtgaaggaagaaggaaaaactaagaagcataggagttattaaggctatttcgtgcaggagccagtaagcccaaacacctccacagtccttgaaaataacactcaccagattatagcacagcacaattttaatgacaaggactcttctggcagctctcagcagacattaagcacctactttataccatagactttgggtaaaataaggagcaatagcagctgtcctgttaggattttctctaaggcatgttttagagttccatcgaaaatggttctattaagatgagagttgatccataaaggaattagcttcagttatctggaaattgacctgtgaaccagctcatcgatactcaatgatgatatatccaagaaatgtgtgccttttgtaatatcttttaaggaaaattgcattttattgggttagatgacactgtcacatgtagttcatgtgataatttttgtcattttcttgttcctattacttttcttggaccacaaacttctcaattgccagtactcttattttctctatcctacaaagctttcctggagaagaggaaagggctatgtctacccatgttctattaacctctgttagcataagaacatgctgccataccttttgttcaacaaccactggagtttgcctgagaagttctccccttcatctatatgtgcccctccagatttgcatgactttgactccaggttgttgaaagtcaatctctgtttttctttctcctttaaccctcatagtgctatgcacatgtgaacataatttgatgacaacgaattgtaatttaatatttgtagagtttgatgtacgtgtaagaaaaaaagagaaagcatccgtgtctcccttctcttttcctcaagatgtttttcatgtaggaagtattttaacttggcctctttcatttttctggttctacttttctaactcagtgcatttactggttgtgaaaactctagtcctatcgattggacattcttacctggaattaaggtgggaaataattcactaagttaactttccttaggcaaccaagagtttaatgtgttttgttaatgaggaggggtagaaatttgcaatgggataaaatgcttgttaggtctaaaatggttccagaattaagttttaggactccgttgcacatatccaccagctctgcctttctagaacacttgtttaggttgtttttgacaatcttgctaaatatattagcactatacaagagaataccaggatttctgtaacttaaaaaggattttgcttatcctaaagtaaacaaatgtctttgtaaaactagttctcaaatacatgctaatgccctaggttacagctacatatctatgttcgtgtgtattcaccccatttcatagattactacagcaagcaaaacctagtgccttcataccacatatgagtaaccaggaaagactattgtttttaataaaccatactcccatggtatctaattcttcttatggactaaactggtctgtgaatttgtgattgtcttgggcatatgtggtaaatattctcaaagggtaaaaatgtttgatactaatgcattcctaaaacgttgaattatatatttgcatgccttgaagtaagtggaagataaccattaacaagaaacttttttttcaattacccaggggttactctggtggttgatgttaatcagtgtttggaaggaaaaaaatcaagtgatattttgtctgtattgaagtcttccacttctaatgcaaatgacataatcccggagtgtgctgacaaatactatgatgcccttgtgaaggcaaaagagctcaaatctgaaagaggtaagttggtttgttactttagcacaaactaagtattttaaatatcatttctgtggtattatattttcttaattttaagacaagtaatgctttcaaattaacatttctgtaattttttgtcatctatggctaaggaaattaggaaaagttttagatgtttctttttagttttagaaagctatgatgagctcagtggcaatatatggatggcattaagaaaatgtcatatttgaggagtctgtgccttatacaggtcatgcttattgattcatttattcgtgtgagtagaccagtgatataaacagatgtttacactaatattttctctcacctaatcctttgtgattgcacagtattaagtaggggtaaagagtaattctgaatatatgaaataaagtacaatgagccagcctgcaagggatcagttggcaaagctaggcaactagttatgcctactcaatccaatggcagagcctacattgttagctctggaaagaatctttgagactacacagtttgatactcatttttcagatttggaagttcacattggtaagatttcagacagagggaaagaatggtagacccaaggacaattaatttttattccagaattcctttagtagatttttattaagcacctactatttcctagtgtcaaggatcaaggtggctgtcaacttctaggctagtatttatttgtaccacattgtaggtcatctacaggatactattcatctttaagaaactagtgtgacagtgtgtggccttagaagtagagcttaaggaaaaaaaaaaacttttttagtccaacttgatgtttgtctagtagtactctatgtacttgttttcaagtttcatatatttccaacttggagattccaccttaaaattcagttaattttctgttaatgaaatgaccactctcttacttggcatctggtcacccttgagtccctctctgttccattcagatctcttcatcaagaattactgtaatgtcccctgtctcatccttcattgggaaagaattgcataattgtataaatgagctatcctaatttcaaattcatcctggaaaaaacttagttcatcttctgtctcctaaacttgctatgtcgtttcccacatgtcatatttgggtgactatagtcaaatccctgtgtatccaattcagaaacctaggaagtgctttagattcattcttctgggaagaaaaaaatggcagcaagacttttgtcagctgagatcatattgaatctgtaggtaaatttgagaagtcttgccatcttaacaatattctgatccatgtacatgggtatctttccttttaatcaagtttaaaactctttcaacaattttttgtagttttctgcatataaggcttgcatttgtttcattaaatttattcctaagtattttatcatttttattttattgtaaatattgttttttaattatattttgggattgtttattgctagtttatagatatacgattgactttttattgagaaataatttatatgccataaaattgtccttttaaggtatgtaattaagaggtttttagtatattcacaaggttgtacatccaacacctctagttaattccagaacattttcatcacaccaaaacaaaacccaatacttattagcagtaaatccccatcacccactccccagctccaggcaactactaatctactttctgtctttggcctattttggacatttcatgtaaacagaattatacaatacatagccttttgtgcctggcttcttttacctagcataatattttcagagttcattcatgtagcattagtcagttcgtccttttttgtggctaatattccattgtatgaatatgccacattttgtttacccagccatcaactgatggaacctgtattctgcgccaccccctccccccaacttttggctattctaaatgagactgctatgaatattcatgtccaggttttttcatggatatatcttttcgtacaactgatttttgtatattgatcttgtatcctacaaccttgctgaactcattctaatcatttttagtaaatttcttgtgctgccatccgccttaataaataaagtttcactgaaatccagccacacattaatttatatatggtctatggctgctttcctgctgcagtggtagtgctgagtggttgtttcagagacccatagcctgcaaaactgaaaatatttgccttttttttttttcttttcgagatgaagtctcactctgtcacccaggctggagtgcagcagggcaatcttggctcactgcaacctcagcctcctgggttcaagcaattctgcctcagcctcccgagtagctggcattacagttacctgccaacatgcctggctcatttttgtattttttagtagagacggggtttcaccatgttgaccaggttggtctcgaactcctgacctcaagtgattcacctgcctcggcctcccaaagtgctgagattacaggcatgagccactgcacccagcccctactctctgactctacggaaaacgtttgccaacccctgttctagaaagaagagcatcccaagcaattaaagactgattctcacctccagatagagctatgagcattgttttcaggcacgcacaggatgatttattcttatctctttcacctctggttctaggatgtcttatcttttcccaaactgaaacatctaccatttggtggatggattactcagccttgtaactcagtttaacgcttctatatgttcgcgtataattttgtctgcaaggcatctaaaaagtatgcctccttgtggaatgttcatcacctcttaactaactgtaatcagtcttttttctaagtaacaaaccaactgtatttcttaggaaaactatttggagcccatgctggaaagtagctctcctcagcctctgatctaactacattcaaactagatgtgaaaaatgtaggaattctactttcctattacctactgacatcctaacccaagtaaagccttctaatgccattcagatctcttcatcaggaattactgtaatgtcccctgtctcatccttcattgggaaagaattacataattgtattaatgagctatcctaatttcatattcatcctggaaaaaacttagtttatcttctctctcctaaacttgcctgcttcttttcccacgtgtcatatttggatgagagctaaaaacaacagaaaaatataagaagttctaacttagactaagctaagtcagctgctatcaagtgagctttagactcattgcctttccatgtaaatcaaagttcaagtgaattgaccattggtgattgtcttttaaccaactaacaaattttttacttctcagttcaagtgacgggagaaacattttcaccagctttgcttgctttctttccttcccactgagacagttgccttaagaagggtgattattcttctgaaaacatttatgaatctgacaactattggtaattgaaaatatcataattggctggttgtggtggttcatgcctataatcccagcactttgggcggctgaggtgagcggattgcttgaccccaggagtttgaaaacagcctggacaacatggcaaaacccatctctacaaaaaaatacaaaaaattagccaggtgttgcatgatcctgtggtcccagctactctggaggctcatctgagcctggggaggttgaggctgcagtgagccttggtcacaccactgttctccagcctgggtgacagagtgagaccctgtctcaaaagcaagaaagaaaggaaggaagggaggggagaggagggtagggggagggaaaggaaggaagaaagaataataattacttgtaaacatcctaacttgactgtacaatgtattttctagtagaccaatgtttctaaacagatgaaccagctgtctggctgcccattgaaaagagatacatctctcttcctgggcattgacaaacagaaagaacaggtgaggggcatttaaagccaaatgaagcatcaacacatattaaagagccttaaagttacccctgcttagttatttacatgcatttcaatattctgtgaaaaaattcacttgaactctgatttacctggaaagataatgagtctaatgctcacttgatacagttgacttagcttagtctaagttagaacttcttatgtttttctgttgtttttagctctcaggtctggggaccagaattgtaaccattcaacaaaataaacagatttctaaatatgaagtttagcccatggattcatgaggaggagagattcttgaccaatctaagtcatgactaccataggattttctaacaccccttccccaaaattaagtttcaaaaaaatttttttctcatttcttgtggttgcacagcacaaaatgagtcagaggaaccaggaattttctttttccccactttagttgacctttgtgttgtgcatatgccattttgtactttgagtaacgttgtctccaaaggttctgctttggtttaatgccgaacattggccgtccttaaataagggccacagtccttgtgggtatctccttattggagaaattgcaggtaaactttgtaagcaaagaggatcttgccgattggtctcctttgtctacatgtgttgtttgcatctacctgggacttataattattgtttgcttttccttctctttggctgcttttggccaaacatgtttttatcatcctcatgaaagatttaagttccagagctagccttagatatttgtgtctcttccttttctttgggttagcaggcatctgccattaaatacatcgaattcattccatgttagtgggtcacttctgatgcctttggctgtctgaaggtttggtgaaaaacatattcaattattttacatattaaagaaactacactaatgtttaagggttcactgtgtctgtgtagaatttaacaaacttttttctttagtgtctagtgacggttcatggctcaaactcaacctgcacaaaaaatatgactactattacaacactgattcaaaagagagttcctgggtcacacctgaatcatgcttgtataaagaatcatggctcacaggaaaagaaatcgaggtaggaggttggtgtttgatggataactctactgtataaagttaaatttgactggttttctatttctgaatcatggaagtgatgagaggaactaactgatttatctgaagtctggatatgtaataaagtcttcatgaactgcagttgaatgtggctgcattgttactaatgtacagaattttttccatattggcttaacaaaaccaaatagagcagggggaagaaatatttcactatttatttgggatggtagattatcctaagaaatcaatcttaagattttccttgacttaattaagctcaattaatgataattcctgggttgtcaatatttaaaaggtatttctttccccccatctcagcctgcaacttaacattgtacctttcaaaccaaaatgtcatttttttctacaaagtgctggagagggcatctctgccacacatggccccagccatctccaggacagcttcggaagcaaagaacagagttgggcaaagagcaggatgggtaaacattaaatgtttgcttcttccgagatggtcatcttagcatgttttcattgcttaacatttctagagatctggatgtacccatgtccaaatgtaagtgcaaacatcacaattgagtgtatcttatactttgctttcaattaactgacataaaaattagccatgtgtccatgtattgtactaaccaagagttaaacaagatacattgaactggaatttctatttaactactaaaggtcccttttaactaatctgtgacccatatttgaaagctttcttctaccagattttacttattgaaagcaatttgtccctcctctcatctctttttaaccaaactatataaatagtacctgtttgagcttcttgttaggagtaaagaaatagtgcattagtgaacatagtgtcattattgactattaggacatttgttagtttttgtttctctttttgggggaacatttgttattttaaataaaagaagaaactcatttagaaaagtctgcattaggtgaaaccccatctttactaaaaatacaaaaattagctgggcatggtggcgggcacctgtaatcccagctacttggaaggctgcatcaggagaattgcttgaacccaggaaatggaggttgcagtgagccaagatcgcaccattgcactccagcctgggcgacaagagctacactctgtcccggggagggaaaaaagcccagaaaagtctgcgttagaatctcaggttcagatgctttttctcgttataaacaagactggctggagtctcaggggtcctcctgattcccccatgtgccttgtccattgtagtcctaattccctcccaaatattcagcaatttttatatatataggagcccagggctgaagtatttacaaaaaaagataacaagagcaaagctaggagaaaaagtacagccaaaagagctattttcagtttcagttctaggtcactgaatttcattcattttttagttgcccctccctacatagaggaatgagaggagcactttgacaatagattatttgcataatcatggctttgttagatctgaatgttttcttgcaacatgggaatagggaactaaatgcttggtgaggctttcctgaaacaaaagacttagctataaacaggtagtgaggtagatcttgccgaatggccttgtttgtgaggtggttctttgctttgtctgaagttggtgggcagccatgaagaaacaggagggggtaaagtcagaggaatgtgaaattggaatcaacccttgtagcaagatgtctgaaacaagttatggccaaaagtaacctttccaactggtgtctctacaaatacccaaagaatgtgtagaactgcgaatgaggtctcctgaaaccataaacatagccaagtacccctcatttgtatggagtttcactttccaatgtactttcacatcactttgatccctaaattatcctctaagtagagatagagcaaatattctcatcttctatttttctaagtgaggaaattggggcacagagtaggtgaagcagtttgtactaattctgcaatttgtgtagattttgtcaataaacagatttatttccagtgcttccaacttctagtctagtatgttttccactttttgcattgtttttgacacagtcaccggtatctctgagtggttatatcatgtgcccattgctctggaattaataacataagttggtggcttaagaaatacataggtactttaaaaagtgagtaatgcttcctaggaggaatactcttgaaggaatattcaccaacattgctttggatttaaaaacaaaaacaaaagttggacccaaaggatgtgaaacctgctgataatggatccacgcgtcataatatgtttaaagaggaaatactgatgataattaagttctattttgggaaaaaacaagaacacatatcttatagaatcgttaaaagtcagcatcaaagatatcgcagtgtggcagtattgcagacagaatcaccaatgcagtatttactaaaacttagaggaaaaaaacatgatctgagtctgaccaatgctaccaaaaatacttaatgacaagaagatagtgaagaacacagtttattgactcatttcagttgttcagaggtcgtacaacttttaggaaaacgacattgtagcaatggattattagtgctaattttgaagaaaaaaatgaaattatagacatactaaaaatttatatgccatggttgaaaagatgtatcaaactataaagcagcagcatcgaagatttaaaatttagaataaaaattgatcatgtggcatcccaagatataccccaggtataactttttgttatatcaagcatcagtctgttaagattattaaccagtggaaggtctaacactgttataaaaaattgtatttattctaaacaactggaatccagttacctgttttattcaatgaatgcatacatatatgtcttctcttaaagatatgtatgcatctttggtatgatttcacttttagctctttaagttaaccaaccattaattccagttgtactagataagagtcatcagctgtagaagtgacagtccagtctttctttgcatctctcatcgggcataaaagtaaaccctgttcataccccacatgaaactttcttataacccccttcttccttttttctcattcttctagatttctgctctctatccttaatagcacttatcttgcctctcccacccctttgtcttttgccccagagcatcattctgagtttggccacagctcgttacaggggtctgcctactctggcctggggaagaaatgggaaagaagtctgaggaccttatggccattgcagtcttttccttggcagtccgagggaagcgggaggtgatgcatgtttttacagcaagcatccttgtccctttacattctgtggagctcaggcctcatgcctggtccttgccagcatcatccatacatctctgcctccaaatcctgagatcattgagctgcattctcttgccacctcagcaccaagctcagagattccaaaatcatattgctagaaagaagttaagccagtttcatccctcagctctgcttaaatttgtttttaaaccaagccaaaaggagacatccatattattttctaaaagataaaatatcagaagctattctatgtgtgcctttcagctgatgtgtgaagtgtaaccataagaaatatctcttgccaggacattattgaggaagtcacagtaggttacattcgtgagaatatatggtctgcttcagaagagttgcttcttcgctttcaagccacaagctcaggacccatccttagggaagagtttgaagctagaaaatcatttttgcatgaacaagaagagaatgtggtcaaaatacaggtatgtggatcacctgccactgtttacacaaaactgtcatatcacctgaaaatgttttatttgataatagaatagtcaactaccagcattcctataaacaaatctgactgcatatttttacataatcagtgcccctagtctacttcactaaggctttaaaataggaagcattttgatgatgaatgacttaacctatggtcttctagagagcatttaggagcaccgcagatttgcacagatccacctgctgccaacctagttggacccaaagggatataccttggatcagagttgaaatcatacctgacttggggactttacaatttggcttttttgtggttagtagatgttgagtggcgtcttagtttctgtgctgttctagcctgaaagaacaggagaactaatgaaataaacagatttagcctctctaagaatgtcttctaccttctgtaatctgtcactcttcatttaggccttcaggagaaaccttcattcccaatttttttgctataaattgttcttaagtttgcatgacttgtctaaactttctgattggcaggagaatttgccaggtttagatgtttctcttctgtattcctatagcgccccctaccagtcaccacactggtttgtgaaaggctgtgagtttgttctttttattgtgagttcaaaggggtattattaacaactggtaaagtctgatgctgatgggtttttactttgaagtttcctaaattgaacatttttctgttgaagaccttcttttttgtgtggtcactggtgaactcatctgcttttcccacctaactgtaatgtccaaggcagaaaatgaattttacaaacatttgtcttcttgtatcttgcacatgataggtgcttacatatttaaatttgcttggagcttaagatattattagcaaagcagaaataattaattttataaaagaaatttctactataaatctgacactcaaaggatttttctaggtgggccaatgagtttacaatgtattcctttaaacaaatagtaggcaaaacacacaggaagtgaacaaaagcctaaaaatagtcatctacactgatgagactctaattttgcacaaatttcacgtgtcagccaatataaaattgggaccccacactctccagtctcaggtcacacagcagtgttgcagttggaagatataccacagagcccaccagtacagaatccctctatattagaaaccagggctgaaggatgagagaaatggggtaaggacaggaacgatcatttggagcctttttcctccacctcagcagaggcaaaagaattgacgaagcagccatcaaaccatgaagtcacctcaccacgcctttttttcagtcttctgacaattttccaaaacagagggcatgaggcctaaaggtaagcctactttacagatgtggaccagaagtgaataatacagttaataggaacctgctgacccataaaaccaagagactgtgaaccaaaaggtgtcatgctaatctcatttctcaccaaagtggctggttcaccttcaagtaggaaaatgttctgatatctgagaaggtcccctacgtaaaacactgtgagcttcctagctggctgaactgccccccagacacagtagtcttaacacatttggagagaaatacaaaggcaaaactcctaggccgaggccagctatactccggctacaccaccctccctgccatcagtggtctgccaaggaaatgagtagtggtacagagaatgtgcagcatgatcaacatccagcattctgtctcaagtgcttatggagttaactgggaggtgcccaggtcaatatagaggaagtcaaggagaatctacatagccatattatttttgagcagttagaagtccccgataaaattgcctgagtgagccagaaaaaaaaatctgttcataaacaaaaaagattttatatcagaaatagaaaaaggaatgtaacttgtaaaatataagtggagtagatatctagagttactcttccagaagacaggagaaaattttatactgaagctgctttatactgtcaaggaatttgataagacatggacttaatgaaataagaagacaatagaataataaaatgaaaagacagctgacagctaaggagaggaagagaaataatgatgttatagaatgtaaatgaatttataactgcagaatgcaaattagacactgaacataattggagcagacacaaaaaacttcagaaaaatccacaaaagatgagagaaagaatagatgactaaaaacacactttctcatctgaaaaatataatgcccattttattgcagggtggtgaagactgactggaataattcacataacagatgtttcctagtatttgcttctcaagtgcttgataaactttagaaatggtaagatgatagagataatgactcagaaggcagataatggggatccaatattgatattgttggtgtggcacaggaaaacatcagaaaaaaatgaaataggattagagtaggtaactacaggaggaagtttttttcatgaactgaagaaagctagtatactactttttaggaaaggacataatagtggcaaacaccaaaacttagccctgagaattaatgaattattgaacttcagctcagggagtgccacaagcatcctggtgaagaaaaacaagctactctgaaggaacttcacttcgccaggagcagtggcagagtctgtgggccaagaggaaggggatggcctgggagagtcggtcctcagttgttttaatgtaaccgactgctcttatagatggctggattttttttacctttgaggagagggagaagaggtaaatgtttagggctttcttggctaaccgagatcacacaagtattctgtgcatcagaagttggcattggtaatttgaatatctctatactgagtgtccagttatcaagcatagcagccagtgtatcaagccagatttcccagagagtaatagttaaagtctataaaatagagcaatgacctctgaggtctaagcgttttgacagacttcttttatacagatactctgcacagaaaatatatttatggtactagaaaacaaaacaaataagatggctattataaattttcccacaagttcccataccaggcaggagaatgagactgccatttttgtaaatccttttttttttttttttttttttgagacagagtcttgctctgtcgcccaggctggagtgcagtggcaccatcccagctcactgcaacctccacctcctgggttcaagtgattctcatgcctcagcttcccaagtagctgggattactggcatgcgccaccacacccagctcattttggtattttttatagagacagaatttcaccatgttggccaggctggtcttgaactcttggcctcgagtgatctgcctgcctcggctttccaaagtgctgggattataggcataagccaccacacctggcctgtaaatcccatctgtctgtaattttcaaagtttctttatatcaactgtatacccatatttgcttataataaacagcctctaattagagaagagattacaatgtcatggctatgcacaagagttctgttgttaggacataataggaaaagctcatctcaaaggaactaaaacttacagactaaaaaaagaaaaacagaattttggcaaatgaaagatgaggcatgtagtattctgcttctatggaacaaaaaaattcttttattattatgctttaagttcgggatacatgtgcagaatgtgcaggtttgttacataggtatacacgtgccatggtggtttgctgcacccatcaacccaccatctagattaggtatttctcctaatgctatccctcccctagttccccaccccctgacaagccccagtgtgtgatgttcccctccctgtgtccatatgttctcattgttcaactcctacttatgagtgagaacatgcggtgtttggttttctgttcctgtgttagtttgctgagaatgatggtttccagcttcatccatgtccctgcaaaggatgtgaactcatccttttttatggctgcatagtattccatggtgtatgtgtgccacattttctttatccagtctgtcattgatgggcatttgagttggttccaatcctttgctattgtgaacagcactgcagtaaacatacttgtgcatgtgtctttatagtagaatgatttatatcctttgggtacatacccagtaatgggattgctgagtcaaatggtatttctggttctagatccttgaggaattgccacactgtcttccacaatggttgaactaagttacactcccaccagtagtgtaaaaagcattcctatttctccacatcctctccagcatctattgtttcctgacgttttaatgattgccattccaactggcgtgagatggtatctcattgtgattttgatttgtatttctctgatgaccagtgatgatgagctttttttcatgtttgttgactgcataaatgtcttcttttgagaagtgtctcttcatatccaggagcaaaaaaattatattcccagccaagctgcctttgtttggaaacgtaaaaaaactcataaatatagaagaataccagaaaattttacataaatagttatgagatgaaacataataatgagctctcaaggtaaatagttaatccttagtatattaaaaaaaaaaaaacagaatggacgaatggggtaattttgccaatgcaggaatgattcaatattaaataatctgttactatgacaggtcacttattcagaatgtttgcgaatctcagataattgaaattaagtgtttttggagtttaggtaattccagaagagcagaataggaacttgagctaattccaattatcttgtttagcctttcagtatggactaaggaaggagtggaatttataatatacattcaaacaattgcacttctctgctttaaaccagtgttaaccaccaaaatataggaactgttaagatccatcacaacacatgttttactggttggactgccatggaatcccagtgacccacgattagggtccacttcccctagtttctgttgtgctgttgggccacttttatgaacaactgttggtgacatcagagaattttgcccatctcagaattgtcacactgtgacaaatcccatggggtagcattttctaaacggataattaatttaaaattttttattttggttatttacatttttatcatttaatgtgtgaacacatacccaatgctctctttgcctggaagattggtaaaagtacaaaatctcaagccttccccgaggcctactgaatcctaacctgcattctgacaagatcctcggatgattttatattcacattaaagtttgagaagcaccgttaagatcactccagtttcaaaactccagataataattcatcttcctgtataattctttatcaccataagagcttaagggagaaaaacccatgtgctcttttcaatagttactgcaaaagcatttgatagaattctagactcattcctgtgtttttaaatgattgcattgaagtttaaggtttttttttgagggcaattggcatctttataataataaactttacagttcaggcattaatctttttccatttattaatctgttccaaactgtaccattataattttattcctttatatttaagtttactcatgtatatttttctgctattgtgaataacatctttattctattgtgttgtttattcttgacatgtagaaaacttatcaattttatattcattttataactagtcaccaggatgaactcttagttctaataaatttttagttgatcctcttgagtcataactaccattgacacttctgatttttttttaaatctttaattttgtcaaggaatagattcacatagccttaataatatagtaagctttaaggacttaaaaattatttgggcttgcctctgcttctggggaaatggaatgcatgttcttttccctattcttccgtaaatacaactaaaagcctccaatattatatataaacaaacataacactcttaaaagtgaagagaaaaaagtcagactaagtagtgaaccttgggacccaaggaatgacatagtggtgagttctttgagttttctttttgtttatatttttctgacctggagctggagaggctggccacccagaaatgccaatgggtacaggctctgatatggtttggctctgtgtccccacccgaatctcatcttgaattgaacttccataattcttgcatgttgtgggagggacccagtgggagataatttgaatcatgggggcggtttcccccatactgttcttgtggtagtgaataagtctcatgagatggtttataaggggtttccacttttgcttctttctcattctctcttgctgccaccgtgtaagaagtgccttttgccttccaccatgattgtgaggcctccccagccacatggaactgtgagtccattaaacctgtttttcttcccagtctcaggtatgtctgtatcatcagcgtgaaaactgattaatacaggctctagtgaaagcctgctctctgtagccaaaggaccaagaaagaaacaggctagcaagacagaaataatttcagacagtaactgctctactctagccaaacaccacacacacacacacacacacacacacaaacgaaaaaaactgtaatgcctccacctaggcagcaaagcctgaatggcgagcctggacttccaccctcctggactgtaataaggcacccagacttatagaatctggatcttgtgcccactgagcagtaatgtggcagccctccctctccctgctagagtggtgtgagaggagccaaggcagagaggcaggaccttcacaccatccagttgtaatgaggtctttcccctcagttggtcaatggaggccacatggggagtaataagaaggcacccctactctcccagccagagtgatatcaagagaggtccagtaggtagctggaccccctcccagcaataacgaggaggccttccccaccttagtagtaaggttccttgggtcccaagattcactagcctcctttttttctcttcacctttaagagagttatgtttgtttatatagacagaaaccaaatggagaacctagccttctcctcccacctcctagtaatgaggcagtgcccccactttttccttgccaaaacaatgtcaggaaaagccacctaaaacagtaggattaaataagatccaggaccccaaactaccgacattacctaaggttcaatcacttgactgtttggatattgcaatcacaacaatcacttatgtcaagaaccaagaaaatcacaacttaagtttaaaataacaattcctaggtgcccacacagaaatgacggatgttagaattatctgacaaggatttttaaagcagctatcataaaaatgttaaaataagcaattagcaattactaacatttgaagcaaaagaaagaacatctcaggaaaaaaactaaagcctcagcaaagaattaaaaggtttataaaccacacagtaacttttagaactgaaaaatacagtaacagatgtggaaacccaatgaatagtctttgcagcagaatggaaggacagaggaatgaatcagtgcactagagactataacaacagaaattcccagatctgaacaacaaagaaaaagcagactgaaagaaataaagaacagagcctcagggatcagtgggattataacagaagatttgacatttgtgtcatcggattcccagaggagaggagaaagaggcagtactgacaaagtacttgaaataaaagtggaaatgttccaaaaacacagattcaagaagctgaggaaacctcagacaggataaagtgaaagaaattcacacaaagacatatcatagtcaaacttctgaaaacaaaagacaaagaaaatatttggaaaagcagtgagatagaaacaacttacctgtaagagggagacagttctaatgacagaggatttttcataacctaaggaggccagaaggaagtacaacatttttcgggggaatcaaaggctgaatgaggagtctagacttccaccctcctgtaacaaggcacccagacacttgtagaacctggagagaaaataactgtcaacatagaattttatatccagcaaaaataacctttaggaatgaaggagaaactaagagcacttgttaccagcaaacttccctcaaagaatgactacagatagctctctaaaccaaaaggaaatgaagaaagaagaaatttcggaacatcagaagggaagaaaggatagctagaagaataaaaatatgaataaatacatttttctactcttgagtttttaaagttgacagttgaagtgctgttgtggctctgaatgaagcctgcttcattctctgtggtttctctcaagggatggcgttcagtgtctgtggcttttccaggcacgtggtacaagctgtcgatggatctaccattctggggtctggaggacagtggccatctgctcacagctccactaggcaatgccccagtggggactctgtgtaggagctccaaccccacacttctcctccatactgccctagcagagattcttcatgacagttctgctcctgcagcaggcttctgcctggacacccaggcttttccaaacattctttgaaatctaggcagaggctcccaaacctcgacttttgcattctatgcacccacaggcttaacatgacatggaaggcactaaggcttacagcttgcaccctctgaagcagcagccttagctgtacctgagccccttttagccatggttagatctggagcggctgggatgcagggattactgtcccaaggctgtgcagtgcatcaaggccctgggcccacaaaaccattctgccctcctaggcttcccagcctgtgatggcaggggctgctgtgaaggtctaaagcattggggatttcagttcaacatgagatttgggtggggatgcaaatccaaaccatattaaggcatgagccatcatgtccagttcacatctttatataagtttgtatttgtatttgtgtgtacaatgatggggtatgtgtgtttacacatgtgcgtatttcagaagatacataataaaatgttaaatagtagttgcctttataaagtagctaggtggaagtagagataggtacacaggtatgtataccctttctctttgttcactgtgtattttaatagatattctagatattgaggtacagattgtttgcatagaaatatatagaattattctgtgggttttttgttaacatgtggtatcataatatgtgtggtaagctaaaatttccttttcatattagcaatatatcttagaggtcttcctgttctccaaaatacagagcattgccatagtcagtatatatgaccttactttactctttttttatatatatactttaagttctagggtacatgtgcacaacgtgcaggtttgttacatatgtatacatgtgccatgttggtttgctgcgcccactaactcgtcatttacattaggtatttctcctaatgctatccctccccgctcccttactttactcttaactgatgtgtaacatccctcagtgggactgcaattgcagtgtctctagctgttccccctattagtgaacattttactggatgcacaattttggtattacaaacaatgctgtgacaaaaatacttatatatggggcttttctacacaggtgctttaattttcctgggctagatatattgaaaattagaaatactaggtgaaaggctaaataattttaaatttgatactgctaaattccctccccaaaactatacccttttgtagtttcctcgagctcacacttcaccatctatgctttctttgtccaccgattgacatatggataaggcaagaattttcccaaaattactctgactacctcaagcttaaagccataaaaaaaagttttgacattttttatggaaatttgctctgcctcttcctctttcagttcagttctagttgctttctgttttctaggaaccctcataatttttatctctatgccttcttattttctagcactattatggattgctttaaaagtatgtttgggccaggcatggctaacacctgtaatcccaacactttgggaggccaaggtagggtggattgcttgagtccaggaattcaagaccagcctgggcaacatagtgaaacttagtctctctgaaaaatagaaaaatcagtcaggcatggtggtgcacacctgtagtcccagctattcaggagtctgaggcaggaggatcagttgagcccaggaggtggaggctgcagtgagccatgattgagccactgcactgtagcctgggacaaaatgagaccctgtctcaaaaaataataagaaaataaaagtatatttgtatgatgttaccattgggggaagctgtgtaaaggggtacacggaactcattgtataatcttttgtccttcctgtgagtcgatgattctttccaaattaaaaggtttttttttttaaacatatttatgccttctagggacttggactgaggggaagtctggagcaagtgcccagttcgtcattttgattccatcctgactaaattgttttgactcattacaaaaatattatttttttgaaataacaaaatttcatttaccctttttaaaaagaatgaggtaaatatatacagacatgaaaagaagtttataaaaaaatttgattttttatatttgccctttttaacaaggaacttttacttcctttctaatttgaaaaacagtatcagaattggggtgagttacaaagatgtttcaataaaaagatgctcataaatgaattggaataaactgtaacagttatgaatttacttcttctaaagatactagtttgtgtccagtttttgtaaagagtttcctgtaaaaattattcttaatggtgataatcaggtaaagctatgttgatgaagcattgtttaactttatgtggggatatatgaaatgatggtcagttgcagcaccagtgttttcagggatccaagggattcagggccacaagttggtagagcatcctcctttccagtcggggccacagtgggccacgtgttgtggtaaagatacttaatattaggcattattttcaagcattttttgttgttatcaaataccactagcacctagttaatactgtttatgggttttggagaaattccattttactcctttttgccacccagggccttggtaaagttaagctttccagcaggaactgtgcttctccatgtaatttatcacccttactctgctgtcctaagcttagaactagtctcagctgtgagctgatgtgctctgctgtgtttaactggctacccccagagagggtgtccagatgagatctgaagggagggtgcctgacagtgtcccagctccatgcggcctgagatgtgctctgctcttgcacttcctagataaattgggaaacttgctggtaaataattctataacccactcttttccttaggctttttggaaaggatataaacaacggaaggagtatatgcacaggcggcaaacgttcattgataatactgattctattgtgaaggtaaataccctttcctaccataccaagtgcttggcttaaacgtttcccctcatttcatgtttaatctgaaagacagctatagaaagggagggtacatgtgagccttgaagtcagaaggcagtactggatttgaatcccagttctgctgctcatttacctaatcatttttcaagcaggttggttaaaccggtataaaacctcaagtcctttatgagtggttatgagaatcacaagtgaaagtgttctataaccaataaatgttctttgtctagaaagttcaagttgattatttagactttaggtagaacccagctttttttcatgtttctctttccacatttgcttaagcatatttagaatgctcagacataacagaacaaaacccatgataagaggaagtagagctaatttagggcctatatttgggagctgaattagtcgaacccaggtgaatagctctgggtgagaaagaaagggtactgtgatgtccactctcatggatctgaaagccagaggactggacaaaaatcaacttggaaatctacaacttggagatctacaagtctccagcttggaaatccagatgagagtggaagcaatggaactggaaagtagaatcagattagtttaaagatctttcaggccaggcttagtggctcaaacctgtaatctcagcactttgggaggccaaggtgggaggatagcttgagcccaggagttcaagaccagcctgggtaacatagggggacctcatttgtattttaaaaaataataataaataaaaacaaatttaaaaaacgttttaaactgtgaagacagagaataatgtgacccagatccattgtgcagtagctccttgatgaaatagcatcctatggaacatatgcctattctgtcaaaaaccattggtagcaattggtccctcatgagacctcttcgatgttttcctgtaaaaacttaaaggatattggatgcatttaaagggatgttagaagaaaccctagacttagtttacttgatttcctgactcattgcaactctcagcaaaacgcttcacccttctggcttttatttactgagtttaaggtaaaatagtacaaagttaaattattttccccacttctctcttattaaggtggtgaaatttagagtaacatgtaaagcgttttgaaccccttaagaaacctcagtgaaagatgaagagtaggctttagagattgattattcagtgggctgctttttttctttatcaagtatcattgtttttagaaaaactacacaaaaccgtattacgggttgtttggtgattactttgacttttctctttattttttgttgtacttttctattttttaaaacctttcagattcagtcctggttccgaatggcaactgcaagaaagagctatctttcaagactacagtatttcagagatcatgtaagaaaaatgcctgtgggattttatccaggttgataatgacctaaatgaatgctttattgaaagttagcattgaatgatttttattgaatggtgaacatgaacacttaagaaataatggatcttagaacttcatatgataatatttggaggcttactgttttcattcagaaatcatgttgagagttagacttcaccagtcaggactcgatagaaaatgggtgaggggaaaactgtgggctagtaacaccaaagagaagactctagagaaatattttacagcattacatatgtagttttttcaactgttaactgcttactttaaatagaagcccctgggagggatttcttcctgaatatttaaagaagagatatgggaacatagattggatcatctaagttgtgtgctaaaattattttccctttttagatctctttgtctaggcagttcccctacagtcttgtttgtacttttagctgacttatctgacctcttcttcaaagaaaatggaaaaataaatgttgaatacaccacattgaaatactgtcagttctaagtagtgtcagttcttaaatactgacagttcttaaatgttctaaattcaaaaatgatggagtaggtgggactctgggagatcaagacttgtcttaatcttttgcagaataatgaaattgtgaaaatacagtcactgttgagagcgaacaaagctagagatgactacaaaacattgggtaagtgagagctttctgaaacaaagcaaggattttttataaaccaggcaaggacatattggtccatattggtcacttcagaggctgctctaagaacagaggatacccattgtttccagtagattttgatcatctcaggccccaggttctaaaccagtacacagaggagcacatggtgaaaggaaatgggccttcctattaaatggaagggatcagccacatggtataatttcttcttcaaagagagtggagttggcataaatgctgatttttttttttcaatctaagcgagagtcaaaaatctaatgcaaaagagttagccagaaaataaccttatatttaaattgtttaatttgttagacatagtctcatctcccaaaaatgacaactgcaaatatcttcctacaatttcattttgaacttttcacagaataatttttaatttttgtttgtttttgttttgagacagagtctcacactgtcgcccaggctggaatgcagtggcgcaatcttggctcactgcaacctccacctccccagttcaagcaattctcctgcctcagccttccgagtagctggggttacaggcaccagccaccacacccagctaatattttgtattttcagtacagccggggtttcaccatgtgtgccaggctggtcttgaacccctgacctcatgattcacctgccttggcctcccaaagtgctgggattacagattaaattttttaataaaaatttgtagaaagtttgaaaatagcaaaataaaattcacccaaaaataacaatcacattttgtgctatctccttacagtcccaactttgcctatgtttgttattttggttttttacagatcataagttgattctttatatactaaatttttaacattctaattatcacgggaacatgcacagtcaaggagagcttgatgataaatttactagtacttacagtgcctagtaagtttagccagcaccttttattgtctaaagtttgtctgaattaagggatgaagtatatggctcaagaaagatcttccctggtacttgttaaggaaaatctagggacgcttgaagtcctcactctgcctccagcctgcagaatctactgaataatgtctcattccactagattccagctcacctctcagctggtagatatgttgttgtttttggggttttttgttggttttttttgtttgttttttgttttttgttttttttttttcttgagacggagtctcgctctttcgcccaggcaggactgcagtggcgctatctcctgcctcagccttccaagtagctgggactacaggcgcccaccaccgcacccagctaattttttgtatttttagtagagatggggtttcaccgtgttagccaggatggtcttaatctcctgaccttgtggtccgcccgcctcggcctcccaaaatgctgggattacaggcatgagccactgcgcccagccgtttttggttttttttttaaagaaggctaaagaggatttttttttctgagccctaacactaaaatatgtttgctgttgcttttatatatgaaagatgacttcaaaataaattttccaaatgaacacaggctagttttcattttattcaggtaaagtgtttttttttaagcagttatagtgatgttttttgtttgtttacttttttattacaaagacaaattccaattttaaaatctaggcaactttatattggggcataaaaggtaaatagagaaaccatctcggtgagtgagttagatctaagcttctctgggcttcagcaaattgggtgcttttatggtaaccaaaacataaattttcatttctttcttagttcagcatctttagaaaactaaggctttgggattttctaatttaaaaaaaaaaataacttttctaagtttgttatcatctgttctcccccttttattctggaatgtcactgaacgcattccagcttgaaagatgctgaaactaagatgtggtcagttgtaggagcagactataaagtggtctgatttcctgaaattaaaatacctgtaccacaaagtcattctcagatgaagatggcaaaaagcctagtattgatagaggaaatattaaattcgagccataacaattagtaaagctaaaatactaatttagttttttccgatgggactgttaatacatatgaagagacacaacccttagtgggtgggagaggcagccatcaactctggccacagtgggagggctcatgttcccctaacttggctgcatggatgagcggtggtgcattgctaaggccttccctgaagtggtcatgtcagtggcagcatctttgctggaaatagaaggaaaataaattgatgtgcttcagtggtcaggaaataaagggtcccatgatccaaggaaaattctccaataaaggccatttatgcagttgtttgtggtttatgcagttgttttggtgttagttttcttactcctttagtgtcaaaacaccacagaactaaggtggaagtaaaaggaagactgtcaagggcctaggtgtaaaggagggcaactaatgagatggccatggctggactagctcttccaagtcatctttctattactgggtctaatcattcgtcctcaatggaccagacaatttattcttacagtttacccagatctgatctccctaagcatgttaaaaatatttttccaagagtcagagtgccaggaaattaaagcctaaagttccaggtactaaggggaaaacccttttagaatttatgtgagaatgtccctctcaataacaggggctgacccctagattctgagcaccctcccttggccggtgctcaaaggacaagggccaagtttcaatttctaaaatctttttatttcagctaagtagaacattcgttttacttatcattctgttggttcctgtttggcttttacagtcctcccttcctggcccttttctaattcagctttcacctacttccggctccttcccaaagatcctttgggctgggagaaaccactttctgcttcctgcagcaagaatgtaagtcacttatctagctcaagcacaaggtctcagggtcgaggtaacttatgttaactttctttcccaggttcctgaggaatgaggcacagataggactatcttcttagcgcatgagtccagggaacagtgtgagagagagctgataaaagggataaaaggggagttgataactagaaaagagtggggccagatatctgttttgtgcgtttatttattgatcagtttccttgtccagattttaaattgtgtgggggtgggtagaatgattctcaccctagaccaagtactttcattggtatatttttctagtaattatttaagaccttgtttctttcctgttgataatcattccaagctttcctaattaaagtatacctgttcctgtcactgcagttggctctgaaaacccaccattaacagtaattcgcaaatttgtatacctgctggaccaaagtgatttggatttccaggaggaactagaggttgcacgattaagggaagaagtagtgaccaagatcagggccaatcaacagctggaaaaagacctgaacctgatggacatcaagattggactgctggtgaagaacaggatcacactagaggtcagtggggtttttgggactgtcagctcccagaagagggaagacgcctacatacagtcaagagtcacttaatgacagggatacattctcagaaatgtagcattaggtgatttcatcctgatgcaaacatcatagagcacttacctaaacatagatggtggagtctactacacatctaggctatatggtaaaaaagcctactgctcctaggctacacacctgtacagcttgtgactgtactgaatactgcaggcaattgtaacacaattgtaagtatttgtgtatctaaacatagctcaacatagaaaaaatacagtaaaaatatagtactataatcttataggacttatgtcttatatgaggtccactgttgactgaaacattatgttgtttgtggttatatatgttcatgacactttggtctagctaagttcatttggaatctaagataagtttttatcgtttttattataaattagtggttcttcgtctgtaaaattttaagcccgcccatttataacattttgtaaggcttctttatcattctgaaatgaaatctatatgataaaatgtactgatgtatataccttcagaataagactagggcctttatatgaatacaaaagagatatttaaagagtaattaataataaaagcacacattttattgagaaaatgtatatgcctgatgacactggaagacatgatacagttaccagaggtgtagacctcttcacagaacagctacagattatgagggcttcagtggcaaatgaggcaggaactcattttccaaaatggagaacaactatttgtaaagttcaacattagccaagtgtagtctccacccaatttacatagcagttgcaattctagaaaatcctagcttttgtgtggggaaaatgtattatgcatctacataaaacaattagattctaggctcagataattacaaacagaatcttgacccacgtaaatgaccagtaagacattcaaaagttctgtcatgcaaggtgagggcaattatttacacaagaccatcccacaaattgccagatcacagagcacctctcatccccaatccctgctcactagaaaccaagagtgcccttcaattgttaagatattaaaaaacacccctacgtatttccaaaatgtgactccctacaaagacacactgcccccgttatgcccccattgataacttctaaataaattacggtgtggtttcacatctgtgtgaaacctgccaacatcagggctcaaaaaaaaaaaagtataaaaagtgtcatttttacccaagaacagatgcctaagaccactctccctgtccctgttcccttcctatgtgccacatcagttttcagaaaactgataggtcaaagagggaaactgatcttctggaagctctgagaaggctacagtggctcatagagcgccagcggccagcaaccaagcgaacgttctggacaacggggagatgagcagccacaggaggctgccagttacatgggcatgtgaatgccccaggctggtcctccagacctcataaagacaccagggcaattgtggaggagaaaataagaaaaacagcattttataaacagaaataatcatctcttctaaatattcaggaataaaactacagtttaaatgttctacatttaactctacttttattattttatccagaaaaacaacagtactttttaaaaaacaatgttatttgtattgtttgacatccatgagaacttttaaagtgtaatatattccagaaggattttcagagaatgctttttatagccttaaactgctgtttcacgctatccccataaaatcataaacaggaaatgtcttgccttttaaaataaaggcttagttgcaaatcagtacatagtttaaataatatgtatcttttggaaacacaatcatggcaagttatcagatttttatgaatgcttgaggttttgtgggggttttttaaagccacttatcactaatagataacattgtgaagtttttcaacatatttgcaaacaccagatatgtatccagcattttttagcggttaaattaatgattattaaatatgtagctgttagccttgtcattgacagaatattagtagtgatacaagaacagagcaattgaagctttatttatagtagtgaaaaagtgggaaacgacctgaagcccaaagcaatatgcagagggcgatagaattagtttaatatggatgttgtatagccactaaaaatgatggtttttagactattttaaagcaggaggaaaggtttgcgatatagtagaggagaaaatagtgcctaaggtagtatgatttcttttattatcaaaaaataataatccagaagaagaaagaagttaagtgatttttctttgggtgatagttaagtttatcttctccccctcctccccacacctttttatttttaacaatgagtgtgtgtttagtgaggaaaagagagattgtaaagggaaatggctttgttcttatagaacaatgctagctcttgctagtaaccttaacattttttatagttcttttaaatcagcattcctcctaaaatcctcaaaatctgtaggtcagtgaagtggctaacattggttttaggcaaaaagaatggtttggagaaagaagacagagcaactgaaataagaggtttcctggaggcacaggagccaaaaaataaaaaataaaaaagtataggtcagcctagctggaaggaaagcctaaattaagagactgaagctaatctaaaactagtgctaaaattcccattcatgagtatgatgtatcatctaggagcccagatttgcaggccagtactacctgaaactcaggactgagatttttaactattaatacttaattatactacttcactgcttatattaacatgtggccttgagcatgtttcttaacctctctctgagtgtgttttcttccctggaaaatgttctaggtgatttacatatatttttaatcttcacagcaactcagtaaaattgctgttattacactcactctacagatgaggaaactgaagcttaggttaacctgtgtaggtttaccaagctaattatactctgcagatacccatatcttttatgactccaaagcccaagcccaagcccttcatactagcccacactttctacaaaaacgtttatatcatagcatactacctgcatgcagatatccctttatcagagcaaggggaaaggtggtggcaaaagggcaatactgagatgggggactatcatgaacaagccaaatacggttgctctttcaaaccatggtattcctccaatgttcaatatttattaagaatcaggaaaagtgagttttgatgaataaaaagtatctgcccctgtttgttatccttgtctgggttggctcttgtgtccatcttcaagcttcccaaagcaaacctccattcacacaagcacattctggagcaagtcagaacctcacagggagaaggaagaggggctatccccattgctgtgccgggctctgtccttggagctccagcagacaggtgctgttccatcagcacagccaccggcccgtcctctctcttcccctttctgggttcagcattgcctccgttgcttccctccctccattcctctcattatcctgccttcaccaactctctctgtttctaatgcagaggaatttagatctgccccagatcttgctcaccacccctaccctctcatctgtatatggcaaaaaccattaaccagaagatgaagtctgcaacaaaacaaaaagcccccagtttctagagtgacctccactgaaaacacttgggagggaaaaggggggaattataggtaacaagactttcctgtcgtatatttaaaatcaaggtgatagatttattctgtgtatttgagggagttgaacgatttacatacatgtcgccagctatctgaagaggaaaaatgtggattaactggcactgtaagccacatttattctagtgatgtcttaggacttcttatagataaggattatcagacagccgcctgcctagattcccccttgacctctatctggtggtaactgcacttcctttctttgtactgaagacattttatatattggtaaaacaagggggaaatgttgcttttttaaaaatgttatcggaatgtaaatcaactcccctccctccttctctataaaagcaattggggtgacagaagtaagtgggtaagtcaaggctgcctctctctgaattgagaatgagaaagaataaaatcatggacctggaaggcaacagatgtagccacatggaactgtcttactccagagcttcctagagctctggaccccagctgctcaatgggctgaccccagctatgggagaatggggtgccaggaagtaaacagatttagagcttgccatttaggcaagacctgacggtggttctcatccccaggggcaactggaaatgggggcgggcccatgtccgcttgtgaaaatgactaggggcccctgctgatagccggtggtgggaagtggccagggtgatagacgctggtagtgcatgcagagcaaaacactgttgtccacactgcccatagtgcccctctaaggacactgggccagcattcctgatgtgcaaatagagtcctcacgtggaggtccagctaagagctcagtcaaaaatctgaaaaaagttttaggaaaagcaactttcttgccacttactctgggacagtgaactaatgttaagtggcaggggaggtgttctagaacagcgactttcaaatatgagtcgcatgccattagggtcatgaaatcaatttagtgtgtcacaatgagcaacctttaaaagtggaatagaataaaagcaaatagaaaatatcagcatgtaccattagtgagagagagggtgtatgtgtgttcactaataaaagatggaaaatgtatttcttactgcgggtcccagacttctgagttgccagtaccacaggcatgagccaccacacctggcttatttttaaaatttgtagagatggggtcttgctctgttgcccaggttgatctcaaactcctggcctcaagccatcctcccatgttggcctcccaaagtgctgagatcacaggcatgagccaccacacttggcccgcttccaacttttcttccgaagtttcctggcttctcttaaggcctcatagaattgaagaaagttagggccttgctttggattaggcttaggcttaaaggaatattgtgctggtttaatcttctatccattccactcaaactttctccatatcagcaataaggccattttgtctttttaatcattcatgtgttcactgaagtagcatttttaatttctctcaagaaatttttctttgcattcatgacttggctgtttggtgcaagaggcctagcattacgcctgtcctagcttttgatatgccttcttcactaagcttaataatttctagcttttgatttaaagtgaaagatgtgtaactttcacttgaatactttgaggctatcatatggttattaattaacctaatttcaatatcattgtgtctcaggaaatagggggcccaagaagagaagagaaaaaggaaagttggtgaagcagtcagaacagacacatttattggttaagttctatgggcgtggtttgtggcaccccaaaacaattacaatagtaacatcgaagatcactgataggctgggcacggtggcttacgcctgtaatcccagcactttggaaggccaaagcgggtggatcaagagggcaggagatcgagaccagcctggccaacatggtgaaaccccgtctctactaaaaatacaaaaattagccaggtgtggaggcgcgtgcctgtagttccagctactcaggaggctgaggcagtggaatcgcttgaacctggcaggcagaggttgcagtgtgctgaggttgcaccactgcactccagcctgggtgacaaagcgagactccatttcaaaaaaaaaaaaagatcactgataacagcgccccgtaatagatagtataataatgaaaaagttctacatattgcaagaattatcaaaatgtgacacagagacacaaagtaagcacatgctattggaaaaaaatggtgacaataggcatgttcaatgtaggattgcacaaaccttcaatttgcaaagaaaaaaaatgcggtatctgtgaagcacagtaaagcaatgcacaatacaatgaggtatgcctgtatttccaattacgtgtgtttcaatcctatatgtgaagggaggagataaagagtatgagaattaaaaaggagtaatctcatcaaattttttacaggatgtaatttcacatagtaaaaagctgaacaagaaaaaaggaggagaaatggaaatactgaataacaccgacaaccaaggaataaaaagtttgagtaaggagaggagaaaaacactagaaacatatcagcagctgttttaccttttacaggtgagaacaatttatcgttcactctgagtttgggagtaatactatgttacatgtttgtggcttacagggagtattttgtcatgcttcagctataatagcatacatgttttgagcatctactaagtaccaagtgctgttgttggtgctttacatacattatctcatttaattcttaccataaccctgggagccgtgagagaatgagtactgttgttattcctgcattacagatgagaaaactgagacacagccagtaaatgataaagcaggggttttgaaacgcaggcagtttgacttcagagaccatgctctttacagtattatactacggttaccttcagaaacaatataaatctgataataacaaaacaaaaacaggtgctgtcatccatgaaaaaattaaaataactgtatgtgaaaaacagatatttaccagaaccagtctccccttctatgggggaagagccagagggtttgggatttcaaaataatatttcttttttcttgtattattttcatggcattactatgatctaaatgaatagtaattttccattgcttcctgagtgttggtgagaactgataagtttgactggttatggttggactttgatggatcacttattgttttgtttgaccattgattcagcccgtcagccctactagcacatacagctagtcacagaggaaactgcatgatagcaatagaaattaacaagcatcctcttcagcaggaaaagtttccccaaagaggtggatccatagttctcccttgtaagagtcagatgtctctcagagtggggccactgctgggattccttcaaagcctggagatgcttagatctttgtttgaggatgtcactggcagtagatgtatagagagcacattacacaaaccataaataagaggcgtggctaacctcatggagaaacacgatgttaattttggtaggtttgaaaattctctacttggaataagagattggagaacatcttcaaacatacgaacatcttcacacaagtggccaccacatggcggcacagaaggaaaaggttaacagtacttagaattgtctgtggaacccactgtttcacgccagcaaacctagaaagaaagggggctcactttaaacaggaaaggactttggtctgcctaatttagtagtcaaccaccagtttgaaatttaatcttaggcacttatcattttttacacccatgaaatttcaagcatattgaagattctttagaatttagttttctcaatttgacagaatttgtcataagttaaaatctagtcattgtttattatataggtggaggcacatttatgggaagaagaaaaagtgcaggagcatgtttagaataattccaccaaacttgatccgcaaacaatccaaaatgtacaaccaaagggtgcaaccattcagttgtatcaagtgaactctctcttgaaatcatatatttttcttctccttctcttcttttgaggcgttagcccaatatcactaaagaaattatagaaaagcaaatggcctggattccttcgacccgttggttacactttagcaagacttctttttttgtagagacaagatgtcactctcccacccaggcaggagtgcagtggcgcaaccacagctcactgcagccttcatctcctgggctcaagcaatcctcccaccttggcctcctgagtagctgggactacagacacctgccacaatgcctggctaattttttcatggtttttgtagagacagggtttttccatgttgcccaggctgatctcaaacacctgagctcaagtgatccacccatctcagcctcctcctaaagcactaggattgcaggcatgagacaccacacctgacctagcaaaaattcttaaccaaagccgcagtcagctagtataggtttttggggggtttgtctcttcagtatgaacctaaatttaaaatttttaggtaaccttaggaggaatggtgagtaggcatctttctttagttatagagtaagtttcctttctcctaattcctatatacttcacattgaaaaacagtcactacagagctatcaagaaaaagtactgagctgcttatttataaaatttcaaccaatcattatgaacttaaaagtaaacctaagtgataaagtaaaccagaatttaaggcttcttaaaagctgcccaaactgcttgagtatattagatgaataccagttttcaagtatggaaaaattttcttctcttgtcagaaagaagatgaagattaggagtattaaatttctctttgtacatacttcctctataacctgaacattattgttctctttgaacttctacctggtaggtgtagctgctggagaaaagccacatcaccatgaaggctggttctgtatccaatgggtccatcctcatcagagcccacagggttccacgtccattttaagttctttgttgttttttgctcatggtcttctggcacttcccttatcaactgtcctgaccttcacccctctcttcagcctccctacctcactcccccttctcactctgtgtagaacattgtggccattttgctgtttccacattgtaaatgtattcttttctttttctttccagtctgacaagatagtatgcatttctactcatctatcaatccttctaggccagtctatgtagccgggcccttagtccactttctttttttttttttttttttttttgatacagagtctgtgttgtctaggctggaatacagtggtatgatcacagctcacggcagccttgaaatactgggctcaagtgatcctcccaacctcagcctcttgagtagcagggactgcatgcgcacaccaccacacccggctaatttatttttacttttttctagagacagggtctgtccatgttgcccaggcttgtctcgaactcctgggctcaagctatccttctgcctctgtctcccaaagcgctggaattataagtgtgagccaccatgcccaagctttgccagtgtctttggacaccagattctactggctacccgccctgttttctgcgtctctacaataaatattaatatgtggttcaaaaaggtcaacagtgaaaagtagatataatatgttaagtgtatcatatagtgtgtatcatttaaatcctatcataattttctactatagcttcctatagtatgatatgaataatattaagtaattaatatttgatattaatattttaaaatattaatatatgataggaagctaaagtagaaagttatataatatcagtctataggaaactgtagtagaaagttacactatatactaatagcatagagatgagtacctggcatataaaaattattttatatactcatctatatgcttttagtgacattaagtcattgaagagcagggaatcagatactgctttgtgctttaataatatattaacttattgttttgtgggatttttttgttttctttttccttctttccttctagaccaaccctttatacttggctaagctgattttccagatgccacagaacaagtccactaaatttatggatactgttattttcacactatataattatgcctctaatcagcgagaagaatatctacttctcaagctttttaaaactgctctggaggaagaaataaagtatgtatacaaatatgtatgtaaaaataccagtgaatcaatccttttgttagtggtggctgtctttgatttactaaaattatttttaaattcttataagttattcccacatattaaaatatatcaagtttcttgagaatacttctatattattagagctatattcaagtaccattttctcccaccagtgatactttctctagtgttaaattaacttttgattttgtatgcctgtaacaactgaaaatcaatagcatattgaaagtcagtgaaaacatttaacttaattaaaattctgagtagtaaagccattaacaggtgggaatgcagagtgcaatctctgcctaaatagtcttcccttctttctagaacttaaactacttttgctaatttattttctgactcagttaatgtaaaaattgtataggtagctataatgagtgggctgagaaacaagcatgagaaatgtccttagctcaggtggcctccctaacttgtggaaaccttaagttataccagttcctattggttttgggagcacgggagccaggcacctctgcccaccaggtgtctgtaagcccacgagacatgtgattcgtgagaaataggaatgctatgcagtggaatgtggtaagtactaaatgaaggacgcgtctaaatgaaggacatgtacaatgtatcaggttagaggacaggaggaaagattccaactaggttgactagtaaagattttatagaagaggaggtgcttgacctaaaaccttgaggaacagctacaatttttataagaagagatagaagagggaaataaggcacaatggtggtggaaacagcatgggcataggtcccaggaggaaagtagattagtctagccagaaagtgacttaattactaactaccaggagatgaatcctgaatgatagggtagggccaggtagtgggagactctgagtaaaggcccagctgttaaggctctatttgctttttggggatctgtgaaatcttttttcttcttcttcctaggccggagtgcaatggcatgatctcagctcactgaaacctctgcctcctgagttcaagcaattcttctgcctcagcctcctgagtagctgggactacaggtacccgccaccacgcctggctaatttttgtatttttagtagagaagaggtttcaccatgttggccaggctggtctcgaactcctgacttcagggggataggtcccagagagatggcgggtgaagctgtgcatgcacgtgaggtctgaggggagaacatgggttttggttgggctctggtagaccagttattcttttgtttgggcattgattcaccctcattcgccttacaagcacctacaattagtcaaaaaataaacaaaaaggccgggcacggtggctcacgcctgtagtcccagcactttgggaggccaagacaggcggatcacgaggtcaggagatcaagacatactggctaacatggtgaaaccccatttctactaaaaatacaaaaacaaaattagccagacatggtggcgggcgcctgtagtcccagctactcaggaggctgagacgggagaatggtgtgaacccaggaggcagagcttgcagtgagctgagatcgcgccactgcactccagcctgggcgacagagccagactccgtctcaaaaaataaaataaacaaaactagcatttaaaggtgggaagaggagcacagcaaagaaaataaaaaggaatgactgggtaagataagaaccaggcattgtcaagctctaaaggggaaggatgtggaagagggagagaaagtggtcaaaagagaaaggggaggaagagaggagagaggccctaagaatcagcaaccataaatcaagaaaagctctctcagccatctgacgtggctagaagctgtattgcagctttgagtgggatttgaaaaagtgaaaacagttcattcaatcaagaaagttgtttttgaaatttgataactacaggggcatggtacttgtaccgtgtcacccagtattgctagtcctggtccattttcagctcatacctgccttctagattgaaattgaggctgtgactttattttcagatcctcaaattgctcatctaagaaacatacacgttataaactgggaacagtggctcacgcctgtaatcccagcactttgggaggccaaggcgggtagatcatttgaggtcagaagttgggaccagcctggccaacatggtgaaactctatctctctgaaaatacaaaaattagctgggcatggtggcatgtgcctgtaatccgagctactcaggaggctgagataggagaatcgcttgaaccctggaggaggaggttgcagtgagccaagatggcgctactactctccaacctgggcagtagagtgagactctgtctcaaaaagaaaaaaagaaatatacaccttataaatgattgcttgtttttaaagcacaccaacttagattttcatagagaaaagtataattccatgaagtccttgccttccagagggagaatacattgtttaaaactgtatccaggcccagaaccatggctcaggactgtatttccagcactttgggaggccaaggcaggtggatcacctgagatcaggagttcgagaccagcctggccaacatggtgaaaccccgtctctactaaaaatacaaaaagtagccccgggcatgtggtggtgcacacctgtagtcccagctactcaggaagctgaggcaggagaatcgcttgaacctgggaggtggaggttgcagtgaaccaagatcacaccactgcactccagcctgggtgacagagcaagactgtctcggggaaaaaaaaaaaaaaaaaaaatctgtatccatggaagcaaaccattttgttttgtcttgggcttttttagatcaaaagtggaccaggtacaggacatagttactggtaaccctacagtcatcaagatggtcgtcagcttcaatagaggtgcccggggacagaacaccctgcgccaactcctggctccagtggtaaaagagatcatcgacgacaagtcgctgattatcaacacaaaccctgtagaggtgtacaaggcttgggtgaaccaactagaaacacagactggagaggccaggtaatagaatcaggaaggtgttggtcttctgttatgttttatgatatttttacatgtgtatttattgatactcttaaactttgttaggcgaactgtacaaagtcagttatcaatccaaaatgttacctccctttaacatatccatgcaaattacatcttgatactaaatggtattttcacatttcagagccaggtgatccccaatgccacaacttccataattctctcccttgtttattttctttgtgtatttctaaacctagacctagagatggtgtagactctctcttcacctgataatacgtacttttctttacagttaccaggcaagtaactttaaggtgtaaggtttaacaatccaggttggattggcttattctgggtgggtggttgtagatttaagcaaccctagcttcttgtttcctgtaaaaggatgtctgtgaaataaagtgtacacagagaattatgtaattatgtgggtggttgttacagtactgtttgtaataataaaaagtcaggaaaagtcaaaatatttagctttgagggatttgttaaataaatgtttgtatagcacataatggaataagtatttggaatcgtggtatagatatacatttgttggcacagaaaaaaatgttcagggtatatattccagttggagttaggtgcaataacccatttttctgggaaaagaatgctcattacatacgccacacaggatctgtatagaatgtcgattacacaaattgcattacacccatcaatatgcgaggcccacagacatacatgcacagaggagattggacagttatgcactaaggtatgaaaattggttgtcccaaacaccgcatattctcactcataggtgggaattgaacacatggacacaggaaggggaacatcacactctggggactgttgtgggattgggggaggggggagggatagctttaggagatatacctaatgctaaatgacgagttaatgggtgcagtacaccagcatggcacatgtatacatatgtaactaacctgcacattgtgcacatgtaccctaaaacttaaagtataataataataaaataaaaaataattaatttaaaaaaaagaaaagaaaattggttgtcctctctggtattgttttagattatatgtgattttatttttctgtaatgaacatttgctttttataattaaaagaaatttagctgagtctaaattacctgggtctgcctcttatcttgccagaagagaccagagggaaggcctcaagtccttcctgttccaagttgcagaaggtaccctctgtgaaggtggagcctcccctcatttagtaaacattttgttactggagtcagtggcaaagtccaattcactatacaaagcttgactatagaaccaacttggcagcaaaattaatgcttgtacctaagcctccagttaatttaaagcctttgtgttttcagcaagttgccttatgatgtgaccacagaacaagctctaacatacccagaagtgaaaaataaactggaggcttccattgagaacctgagaagggtcaccgacaaagtcctgaattctatcatttcttcccttgatctactgccgtaagttgtacttgcagcaagtttaacattctttcctggaacgttcttggaatacgatgtaaaataagcccctgtagtgaagacagcagttttcccttatattgtgtttactattttaaaagattgcctacatttaccttttaaattcctgactgttctctaaagaaggggcaatacttcagtagcaaacacagctcagttattatcatcagtggaagtcctgtgattccattaccatctcatcttatgtttaatttttagaaaaactactcagctgaagttgactggaacaattgctgtgtgttttttcctcactccgccttttttccattattttcttttgtcatctgttttatatgtagttatggattgaggtatatagccaaagtactgaagaattcgatccatgagaaattccccgatgcaacagaagatgagctattaaaggtagattttcaagggtaatctcaccatagcttctcctgggggtatgaatcaaaattaccaacatataactttgtaagattattccccatgtatgattatttataataagctgcaggtcttctgtttctaatgactctcaagataattgattaagctgaggttaatttggagatcctagacattattgaaattctttgcattagagcattttgggggcaatgagcattttttcatcaaaaataactttgcaaattatgctattaataatgtgtgattatattcattgcctttattaaactccttgttaggatttacatcagaaaatgatctgctttctcttgggaaatgtaggagaatatatatctttaaaaaaaaaaagaaaactaaaactcttgagttttctctcttaaaaatggtcatgcacttctgcgtcactccagattgttggaaacctcctgtactatcggtacatgaatccagccattgtagctccagatggctttgatatcatcgacatgacagctggaggtcagataaattctgaccaaaggagaaacttaggatcagtggccaaggttcttcagcacgcagcctccaacaagctgtttgaaggagaaaatgagcatctctcatctatgaacaattatttatcagagacgtatcaggaattcaggtgagaggggcccttagttttggagaaacgtgcaagaatggtaggcaagaataatatgtgctctgtgcccagagctagagtgggcatggaggacaggaaccccaggtggttacaagcatttcttctaccagccactggggaaagaggagagagggaagtgcaggcaagattgcctctgtctggcgatcctatcgcacccccaccacagcactcctattacactgagtcttttctgtgtgtattatttctgctgctgacaaaatggcatacttgttcttccttgtatgctacaggcttccagtacctagaatttaaaaatcaaaatagcagatttctgcttctttcaacttaagaagagaggaatcatttttaaaaagttttccggtgaggaagaacttgcttatctacgtcagatacatttgacccttgattaacacaggtttgaactgctcgggtctatttatatatggattttttcaaccaaagacagagagaaaatacagtattcatgggatgcagaacccacatatacaaacagatgacttttcacatacatgggttccacaaggccaatttcaaacttgagtatgcacaaattttggtgtgtatgggggtcctggaaccaatcccccaaacataccaaggaacgactgtagtaggaaatggaatacttgattttgaaaggttaggaaaacccagattttatatttgttgatgattgtgtatgtgaatatgttctgttctattctcaagcctttcttaatgacacatgtaagaagatttaattctattgattttgtgtttccaaattatatcactaatcattaacaagaaaggcatgagtctggtagtcagattcactcctcctggagctctgaggaaacactttcctcttgtcatgtttgttctcatgtctgccatttaatcaacaggccatagaagtgtaacatcagtttggcctcttttaatcctcacttggaaactcatttctcattcctcggtctcccttggagtgagtgacttactagaaaacaaaggtagttcatgattattcatttctatttagaatttgtggtcttttgtgagaaaattgccccaaatcctcctactacagaaagtgttgatttttcaagctaatttttcattctcctcactgactaacaaagtaatatccaggctgggcaacatagggagacctcatctctacaaaaaatttaaaaaattatctgggcatagtggtaagcacctgtagtcccagctactcaggaggctgagatgggaggatcacttgagccttggaggtcaaggctgcagtgagccgtgtttgtgccactgtactccagcccaggtgacagggtaagactctgtcacacacacacacacacacacacacacacacacacacacacacacaaagtaatatccatttcccacatttctcatgaacttttaactgctgttattcctatcagtcatttatgttcccacctattctttatttaaaaagaaacaagaccaaagaagtgagcctcttctaaacttgtcctttcttccactcatatttatcctttgtgtttctcagaaatctacaaaaaattataaccaaagcagcataggaaagccgactgttacatgggaacatgctccccacaacagggctctgctgtttaacctcccccagcctctggctgggaaagcagaggtcatttctggtacataagacccaggtgcctgtaggagagatgccgacaatgatttcaggcatatgaaacatttacaactttatagaataaaatgtatattcgacctgcacaagaattgtttaggcaaaaaatacatagaactattcaactgtgatcacagcatgcctcacttctcttgatctctgtcaaaacttgctttagcttaaaatagactttttagggtctgagtcctgggacatgttatgtatttgggtgtctagccttaacaatctttccatcggccagcaaatatttgcagcaacgaagaagagtagacttaatctcatttttgtcaaactggtaacagaagctctgaagggtgattagggtgatgtaggcccaggagcctgtgctgtttaaagcagcaaatttgactaattgcttttttttctattgtattcctcacacagacttgattcttagatcaagaattatcatttttgactttttaagtttcagggaccatttttaaaataacatttttaagatgacctacgcataggtcactatatcactaagtcacaaacagggcctgaggcccttgccactctctccaatcctgtttgaggagctgggtccaatatccagaaacatggatgcagctccgacagccaggagccagcctggaagaagctgtaacacgtcctctcaaggtttgagatgggaacaaagtacatgtcatcattcaaaatttcctagctattttgatgaaactgtttaatgcacatgtttgagtctgtcttaagacttttcccccctttattaggaaatatttcaaagaagcatgtaatgtccctgagccagaagagaagtttaatatggacaaatacacagacctggtgacagtcagcaaaccagtcatttatatttcaattgaagaaatcatcagcacacactcagtaagtggggatggggagccatcttagcaatggacccatgatttaggcatctgttatcttgaaaatgcttaatctctacaggacttattgtacacatgtgctaatactcatattcttaaccctaaaaatctcgcaattatttattccatgactcttatacattaataaaactccttctcccaaacaacaaaattctatttttacataattattccctgactcctagacattaataaaacttctccccaaaaaagaaagtgtacttttggcataatccatttacaaagccagattgtgactggaatggtggcatatgcctgtaatcccaacactttgggagactgaggcaggaggatcactcaagcccacaagtttgagactagcccgggcaacatagtgagacccctatctctactaaaaattttttaaaaactagccgggtttggtggtacatgcctgtagtcacagctacttaagaggctgaggtgggagatcacttgagctcaggagtctgaggctgcagtgatctatgatcgtgccactgcactccagccggggcaacagagcgagaccctacctcaaaaaataaataaataaataataaaaataaagccagattgtaaatatgcagtttaagccctgagccaggacaggctatggtgttctcatccgccaaagctatgctatgtagacctacaccctgtctctcccctcttccaggaaccctctcagcttttccagtaattttctgggggaaatgagaatattctttttattctaatgttttaacataaagtggtaataaacaggctacgcaacgaaaacaagaaactaccacccaatagtagccttctgcaaagaatcacttccattgttctggaaacccccatttctcggaagcaggcagtttttcacatcatgtgctgtgttatgacatctacatctggtttgcatgcagacatcactgccgtcagccattagcatgtattaagtatctgttgggtgcagggcactgtgctcagtggcatggggaaggaattgggaggctttagatgacttttcaaacattaaaattaaaaaaaaaaaagctaagcattgaggggtttgcattgttttctttttaagatcaattggaacttatttcatgaaaaaatcttggtttttaaaaggtaaccatttcaagaatagtttcagaccttgtgagttgaagcaaggtcctggggatatgttagcaatgcaccctggacctcccaaattagaacctgcattgtaacaagatcccagaggattcagatgcacattcaagttctagatgcttcagttaaggatgcacccaactttggattatacagagaaccaaagggaaagcataacaaatacacattctcaaaggttgtgctctagcccccatcaaaccagacatactgacaagtggcaggttagctgcttaaaatttcagtctattattaagctcttctaagaaactaaagcttgaatgtaggtttgaaggaaagattgaatctagtattgattttcttctttcagggttgaaacagggaacttccctgacatttacatcaagctctcaatacatactgattaaatgaataggctatccttcttttctctatatatgaacaccctagattacaaggaaaactgtccagcaatctagcaatgcattacttacagaaataattatctactggacagactcatttatatttgagcaatgacccatttgtctgtttttgtggtacattatctgtcttcaaagaatatgtacatcttgggtgcacatttgctgaatgcaatatccacatgcgaaaaaaatggtggggagtacttgtttagagtgagagattctttcccaagggtagcagagagaaaatgttactgtattaatttagaagtcttagaagtctttaaggagaaatagtctgttcttttgttaacaaaaattgaaaacagaattcaatcctgggaaagagagcttgtgactgatttggaattccttcctgtgttaggttagaagcagatgtaatgtggggaaattgtgtaatttcataggaagactgtcctgtttactgtctgccttctgtgtggaggcgtccgtgtgcagacacaagcacagcagtagcaggatttgccaagcctgtggccatgtgcttacccctttctctaaggaagatgcaagaacttccaaataagctctttaagaagacattatcaggaaatttttccgaataaagggtagaaggtggccacctaaataatcatttccaaagaaaacagccaaatcagttgccctggctcatcagagaagaagaacataaatttatccatcttgcatattttgttcttgtctcttaattttccctccaaaacatcatatgtaccgcctttccagattttgcccggtctttgtatcacctctattatttatttaatgcctttctttgaatcaactcacctttttaaaaacaacacgtaatttctttgctttaaaacaaagtacctctactatagtgaaaaactagcctgctttgccatacacagaaactttagaagaaaataagtgtaatgaaaacaaaatagttggatacagtcacttccttaccttgaagttatgtatctgaggtgtgttctctctttgttaacaactctccatgtgtcagggaaatgttaagaaaaatttagcatcaaacagatactctctccttcactgatcttaaagattagaagagaacggaaaaggcagtaatcaagacagtgctatgctggcataaggttagacataaagactaatgggatagaatcgagagtctagaaataagccatcacatttatggttaattcattctgacaggggactaagttcaatgggaaaatagtgtctccaaatggtactgggacaactggaaattcccatgccaaagaatgtagttgtgccccttccttccactctatacaaaaagtgaactcaaaatgggtggtagacatagatgtaagagctaaaactatagatctcttcaaaataagatataggagtaaatctttgtgaccttggattaggcagtagtttcttagatatgacaccaaacacataagcagcaaaggaaggaaataaactagacttcatcaaaattgaaaacttttgagctataaagagtaatatcaagaaattgaggctagacgtggtggctgacgcttgtaatcctagtactttgggaggccaaagtgggaggatgcttgaggccaggagttcgtcgacaaaataggaaaaaaaaattagctgggtgtagtggtgcatgcctgtagtcctagctactcgagagaatgagacaggaggatcccttaaagccaggagttcgaggctgcagtgagccatgatcatgccattgtaccctaacctgggtgacagagtcagaccttgtctcatttaaaaaaaaaaaaaaaaaaaaaaaatttcatccaggtgcagtggctcacacctgtaatcccagcatgttgggaggctgaagcaggtggatcacttgaggccaggagttcaagaccagcctggccaacatggagaaaccctatctttatttaaaaatacaaaaattaaccaggtgcggtgacacatgcctgtaatcccagctactcggaaggctgaggcacgagagtcacttgagcctgggaggtggagcttgcagtgaaccactccagcctgggcagcagagcgagactttgtctcaaaaaaaaaaaaaaaaaaaaaaaaaaacttgagaaaaccaacagaatgaaagaaaataattgtaaataatatgtttgattggggacttgtatccagaatatataaagaaatcctacaactcaatgatagaaacataatccaatttaaatattggacaattacacatcaaaggacataatcaactgagtgaaaagataatgtatggaatgggagaaaatatttgcaaatcacatgtctggtaaagggttaatatctagaatatataaagaattcctacgaatcgacaacaaaacaacccaattataatataaacaaaggactttaacagatgtttttccagagaagtatacagatggtcagcatcactaataattagagaaatcaaaactgaaactgcaaggagataccactcacacccagtaggatgattaatatcaaaatttaaaaaaaaaaaaacagaaaataagtgttgagaaggatgtgaagaaaatgcaacccttgcaccccgttggtgggaatgtaaaatggtgcagctgctatggaaacaggatggtctttcctcaaaaatttaaacagagaggctggagtatggcggcacgatcaattaaaaaaaattaaacatagaattacctcataatctaacagttccacttctggaagtatacccataaaaaattgaaagcagagtcaaagagttatttgttcactcatgttcatagcagcattgttcacaacagccaagcgtctatcactagatgaatggataaaatgtgttatattcatacaatacaatattattcagctctaaaaagaaggaaattctgatacatgctacaacatggaggaaccttgaagacattatgctaattgaaatgagccagtcacaaaaagacaaataccacttatctaaggtacctagagtagtcaaatacatacaggtatatttgtggtttctaggggatagaaagaagagataatggagagtgactgccaatgggtacccggtatcttttagggcagtgaaactgttctacagtcagagagtggtaatggctgcacagctctgtgaatacactagaagccattgcatcgtacattttaagtgagtggatttgatgtatctgaattctattttggtaaagctgttggaaaaaagattgaaaatggaaaaggaactagctttatcattatgatgcagagttttataaaatagttgctgagaacaacaaattttatctcctgtctccaagattactagttccgtactttggaaatgttgtttcaatctaattagaaatgcaagcaaaaacagatgtgtcgctgttcatgtgtaaggttgtaacaattaaaccaactccattaaaatttgtttaaattaaaaaaaaaaaaaaagtgttgtctttcatggtttcccccgagtgctgctacccctcaggagttaatactgtttcctgtaagacctggcaagacaccccagcagatgttactcatctttgggccttcttaggataaggaaaggggaaaccactcaggacatctaggtctcttacatccttacccatgagagatcttcaatgcaagacagattgaaacagctcatagtagtgattaagaagaagataactgtagtatttgattactgcatagagatgtaaatgcccttccagtttgctaccaatgttaactgaaagatctgcctcattctggactctttcccccaactttgactttttctatggaggaagagtgaagcacagagatcaggtggtagaaggcttccctttggcagaccttgctgaaaaagggtttatgaacacgtttcttgcaacaatttcttgatgtagagtaggtgcttccctctgagatacaataaaaactgtatctatgtctctaatttttataaatgtcatactcatatttaagatttaaatggtatgaggaggaaattatgaaaaatttcatataaatatggtacagttgagaatttacttttttctttgtgtgtgtgttgctttctacataaagctcctgttggaacaccaggatgcaattgcccctgagaaaaatgacttactgagtgaattgctggggtcgctgggagaggtgccaaccgtggaatcttttcttggtaagagcttgttccttctacttatcccttggtttttgtttaattgggtgggttggttggttggttcgttggttttcctatcctagataaaacaattattttggaatttaatgcttaagcatatttaaagaataacaactacacttgccccttcctacagtaagagttctgtaattaatggagtccgggattataaaataattcagtattcttgaaggtaagctccagatatgtcaaaaaggaattgtcaacctgtattatacagaaagaagccatcaataaagaaccaaatttattacaaaatgaaaaatacttttattaacagttatcctttttagtaatttgtatttgaaatacctatgtcccatgtcattttcatttttcaatcagatattttaaaagccactttagctatagtagaatgtgggttttgtaaagaccatgatctcccatttaattaccaagcctatctttcccacagaacctttatcttacattgttggtgccatcatcacaaagagtgaattggaaaaataacactaggttttttccctacaggggaaggagcagttgaccccaatgaccctaacaaggcaaatacactaagtcagctttcaaagaccgagatttctcttgtcttgacaagcaaatatgacatagaggacggtgaagctatagatagccgaagcctcatgataaagtaagtttgggggttaaagggcacatgtctccaaatacacatcttaaatgatgcaaattcaaatgaggctaaatcccaactaatttatttaaaagtatgtgaacattgaaatctattatgtatatccatcaaacatctaaccaaaggataatagactctttagaatttaggaaggcattaaatattataatagtttacaacaccttccttggtttttagttttccatgtagtaatttgatttttttcctttgagaaatgattaactcagcttatgcaagtccttaggtaactgaagagaaatatctattacagagtggccagaagattagtgaggaaattcagttaaccaacgtttatttccggtataaaatcataatataaaaacacgtacctacaataagacattatgatagcatctgatttattggccttccttcctgttaaactgatcctggatatatttaccagctttgacttttatttgtaccctgcttcctgccgctaaagatttcaagtgaagcattcacactttaaataatactatcttttctccatcaaagaatcaaggatattccacatccatcctttacacacagagtaagaaagagaatgagattcatgatacaacaccataaatcaaaagcacccgctgaccaagcagtgcagttttcaagaacttatacaaacccaagaatgcatatcagtacattagaacagttatgtattggggtgagatggagactggaagtggaaaaatgaggacaaagggaacaagtatgtgttgaaacaatacgaaacatattacttccaagctacctgtcctgagttctgaggttttaatttgtggcaagagctttctctcctgccactgatgtgctgaagtgtgcttgaagtgtgaatgaagacagcattcatctccacttgatttttttttttaaacattcaatcatctgtgaaaacaacaggaagagcttcttcactgtgctgtgttgatatgttcctctcttaggcttgttgattttgtcctcagatcatctgaggctccattcggtcatgcagcaaatgcttgactacctactctgtgttcatgcgctgggcttgaggctgggatacaacagtgggtaagctggaaacagcccctgtcttacaggggtggagagcacagttcgacagtaggaccgcaaccaagttgcaggactaggactcacccttggcctcacaagagttgagggcggttctttttgactacagattaccaaggcagatgaaaatttcagggagacaattcagggcagggcaggagagaaagggggagaaagtctacaccctgggttcctctgaacaagtgccaattataaagataactggaaatacagattgtgtggttttgccatgtaaatgaaattaggccaagtatcccatgatctcataagctttgtcctttagaagtaatgggaagaaattttttcttaattagttttgtctgctatttgaacatcattttctaaatccagtcaactccaatgtctgcatgatatctgagaatcaccatttgagtagttcaaagtatcagataatctgaatatcatatatatttatacttattcctgaacatgagtctgcatgattctgcaaattctaggaaatcacatttaaagataaaaccataaaagtcaggcctgtctggaagcaatgtgtcttagcctgggaaacctgggacattgtcctgtttgccttacccattacccagcctctgcccttgtgtggctctcccccgtcccccccagtgtgttggaaacaaacactatccacttctttaatcaccacactatgtagagccagcagtgggtttattttttattgtggtaaaatacacataaaacttaccatttcagccattttaaagtgtacatgcatttagtacattcgcagtgtgcaaccatcactgttgtctagttccagaacatttttatcagatgtgaaccctgtacccattaagtagtcattccccattccccgctgctgcccagcccctagcaactactagtctgcactctatgtctttgaacttttgcctgaagatatgaagtcgtatctcactgtggttttggtttgtacttttccaatgaccagtaatgttgaggatccttccatatgtttgtcatccacttgtgtatttatgtattctttttggagaaatgtctatttaactcctttgtccattttaaaattaggttgtttgtggttttgttcctcagttgtaagagttgtttatatattctggacactggaccattatcagatatatgatttgcaaatatttttgccccttgtgtgggctttttactctcttgataatgtccttttccgcacaaatgtttttttttttttattttgatgaagtccagtttatctgttttttttgttgttgttgttgttgttgttgttgttacttgtgagatttaccccaatgttttgttctaaaggttctatagttttagcttttacagttaggtctattaaccctttttgagttcatttttgtgtgtggtgtgagacaggtgtccaccttcattctttcttgttgttattgttgttgttttttgtttgagacagcgtctcgctctgtcgcccaggctggagtgcagtggcatgatctcgggtcactgcaagctctgcctcctgggttcatgccattctcctgcctcagcctcccaagtagctgggactacaggtgtctgccaccatgcccagctaattttttgtgtttttagtagagacggagtttcatcatgtcagccaggatggtctccatctcctgacctcatgatccgcccacctcagcctcccaaagtgctgggattacaggcgtgagccaccactcctggccccaccttcattcttttgcatgtggatgtccagttgttctagcactattagttaaacagactattctttcttcatagaatggtctaggcacccttgtcaaaaactaattgacaatacatgtatggctttatttctggattttcaattctactccattcacttatatgtctatccttgtactagtgccacaccatattgatcactgtagctttgtaatgagttttgaaatacggaagtcctccaacttctttcttctttttcaagattgttttagtcttgcagttgaataggtctcttgcagttatatgtgaattttaggatcaacttttccatttatgtaaaaaaggcttgaggccagtgttttaatagaggccctaagtcttttatgctcaaaggccttcctcttggcatactgtgagatcttactgttggccgaccactttactaagcagcccagtgatcaatgtaggtaacaatttgaaatcaacactgactggttagccatccctgaaagtgaaatttggatattgcccaaaaggttcaatagaattagttctatgattttagccaagccctgcttctaaatatacttcctttaaagtacatatttgaaaaaatcttgatactaacagataattacaaagtgcagcattgacagggaacctgaaaactgagtctttttcttgcaggcaaggaaactaaagtctaaaagtaccagtatcagtccatggcctgttaggaaccaggcgacacagcaggaggggagcaagtgaagcttcatcctgtatttacagctgctccccattgctggcattaacacctgagctccacctcctgtcagatcagtggcagcagtagattctcataggagtatgaaccctattgtgagctccacatgcaagggatctaggttgcacactccttatgagaatctaatgcctgatgatcactgtctcccatcacccacagatgggactgtctagttgtaggaaaacaagctcagggcatccactcattctgtattatggtgagttgtataattatttcattatatattacaatgcaataataatagaaacaaagtgcacaataaatgtaacgcacttgaatcatcttcccgaaaccatcccccaccctgtccatggaaaaattgtcttccacaaaacctgtccctggtgccaaaagggttggggaccactcctttaaaatattgatttgaactctcatgaggatgacttttttgatttgaacactctcatcaggatgacttttttccaagctaataaaccgaatttgtaactcaagcataagatatagttcttgagattcattagagaaccaaatttaactaaaatcggacaatgacttttataagttatgaagtggacagacatgaaatgcagagcaattgggatgtgaaaatacctagcttttctctatcaaaaaactattctgcttttttgtgaaacagattgtgttcttaactttcagaaatgcccttatgtttaattacaatgtcactagttttccagtcatgagtaactcatcttcatggaggcccccacagtagcagaatttgaggcattgttaatcattatgtttgtaaatttaattccatgctagtctcataattcttactcatcagatgaagatgaagatgatgataatagcaaacacctatgtagtgcttaccatggccagggacagtttttatatactgtgcaaatgcaaagtgttccagaattccaaaccttttgagagctgacagtggtcaaaggaaatgctctttggagcgttttgaattttcggatttaggatgctgaagcagtaagtatataatgcaaatgttccaaaatctgaaaagataaaaaatctgaaacacttttgggcccaagcattttgaaaaagggacccacaatctgtaaagagagaaagagaataacatgtgcatatatatatattaaaataaacatgtataaaatatgtatgtaatattctcagcaaccccaagagagtggaggttattatcagtattttacagatgaggaaactaggcacagaacaggtataaaccttttcctgggtaacacagttactaagtggagcagagattcaaacccacatgatttgaaatcctccagggcccacactcttgatcataaagttttacaacttgtcgagggcaaggtcattgttctttgcattcttaggaatcttagaataaataatgagaattattagctgagcagttactgagtaacggaggctggagcatctttccaggccaaagaggagggacaaagggcacatatcggagtaggaagaaacatttatttctttttcccttgtgtatgtttatagaatagagaacctcagtttgggctattgctatttttctaatactaccaagcacagggatatttaaaaaaaaaaaaaaaaaaaaaaaaaacctggtcgaggaatcctaaaaacctagtcgaggggtcttagggatgacatagggttatagcctcaatctatcacttattaaccatggaactcagcaagttgcctcgccatcagttttctcctccataatatagaggagaggggaaaggaagggctatgatgatcacatgaaattataattaataccacataaattatataaaactatgcagttgtcaacctttcattataacttatgattcaacttaaaatatgtgatccttatggccttaattaagcttagtttcccacaaaagtatgtgtgtttaagtagaaggcaatatttgtggtttttaatcatacttagctgcttgagtgcttaaattgtcatctcttaagaatttcctgtcacatgattaagtttaggttccatgatcccagctgaaagatttccttgttttttggtccaaactagcaggagcactaaatggctaaggtgatatttgaggtctggagctaataatgtaaattatcttgttaggatgttaaatactgaaaatattccttagtttccacaaacactgattgcttttcaaccttgggcacagtataagcagatgacagagggggagcttcaggaatgctactggtaataatagataccatatgaatggagtggccaaacccaaggggccacaccagcttacaagcgccgtatgggctcatttatctacagtggggtttgagcacagctatgatgaataaactccctggtgtatttctttctctttttttcttaattctttttcaaaattagatacctcctcattcagggagagcaagacccgtggtttggatcaacctatcttacatatttgaagagccctggcgccagtactctaagcagttgatttatgctggtcagaccatatccagaatgttatatttggactggggtgggaagggggatgcatattaaggtcattggtaactggaatgtgagcaggactgtgagctctctgcagatgccattgtgaggagctttaagggactgagtggtttcacttggaaaaaggaaagatggtggaagaggggatagaggaacacagtcttggcatttctctataggtttttcaggagctgctgatttggaaagggaattggacttgtttcctgcagctctagtctcttaggtcttagttgccacatttgtacaatcagggattggattgtttttcaaaggtctctctccgggccacagtcctaagactaaccaggtttcatgactgggtggccctggaaggcaggcctctcagagtgagctcctgtttgagaatggaatgtgccaatattgtactctccaaaagaaatttaatatgagccacatgtaattttaacttttctagaagccttattttaaaaagaaatagatgaaattaattctaataatatattttatttaacccaatatatccaaaaatatttaaatatgtaataaatgtaaaaaattgatgaaatattttacattctttgtttcatacaacatcttcaaaatccagtgtgtgtttcacacagcacatctcagtttgtactagccatgtctcaagtgctcaagtgccacctgtggccagtggcggccatcatgggcagcacagctttaacgaccatgtgagtgcttaccatgtgccagacctcacagaaggctttagatcttttcatccaatccttgcatcagtcctgagagattcctgttttataaacgaaaaaacaaaacctacaaggattatataacttgcacaaatccacatggctaatatgcaacaagagtccaagccaagacagatttggctttaaatctgtccgtccccgtcgtccttaagcactagacacactgtagtgggagggaggtgggttccctgtcatgggactggatggttacttatgtctgaggtagaactttggcaatgaattccacaggcctggtgtacagtagaagtccaagggaaacaggctgtgtgagcagtttgtcctccagcaactcttgagcaaataaacattctttgtctttggtggggcacgttttattgactccagtcatttggtcattgcacagcttctctaaagaactagaagttccctagaaactgtatatcacaattagttctgagaatactatttcaaacaagaaagttactatattgacattttttaaatcatccaaagcttttatttttaactcagtgttcctgtttaatacattgatgatgatggctggaggaaggtggtgtgtaggaaggaaaggatacattgctttctcagccacagccgctttaggaaacatgccatcccccacgtggctgtaattagctgtgggcccacctttgagtctctgtggagtatttagctgtgcattcccagacagcctgtaaatccccagcagcaaagggtcatggggccagaggaaatggttctccaaaggctagggggaagggaggcaaggaagacacattgtgattgttcttttcacacagacttctgataaataggaaatgagaaaaatgatgtttacagatggcttattggattttatcctattttcaaaagtaatatatttgtaattaacttgaagggttttctctgtcatttgggagtagttgcccatatccttcaaaatgtgaaaattttgttctcatttctaaatttcatgctacatgaacatttcctgctagagtttaggaagaaaaattagtcattcagtgatatcatgtaatgactctgaaataactaaagttaaatgcaataacgggactacagtaaaagtgaaacttcagatgtcaattagaccagtgtatgtataatttaaacaaacttttgtctgtgtttccttttcttctttcttttctttctttctatctatctatctagatatctatctgagatggtatctcactctgtcacccaggctggagtgcagtggcacgatttcagcttactgcaacctctgcctcccgggtttaagcaattctcacacttaggcctcctgagcagctggaattacaggcacatgccaccatgcccagctaatttttgtatccttagtagggatggggtttcgccatgttggccagggtggtctggaacttctgaccgcaggtgatccgcccacctcggcctcccaacatgctgggattacaggagtgagccaccgcgcctggcccttttttttctttttagaaggaaagccttttccaataatactgtttccaccttatgtaaaagtgagcaaatttgaccctttagcttttatgttaaaacctttgtacgtaattacataacatgatgcctccctaggaagtggtggccaattgccataaagaacacctatgagagaactacggttttcgtacttccagaagaattttccagctctttactgtttactgagaagctcttctattctcttccacctgaagactggaagaagacctaacaaataggtttctttgttaaccctatttgttagttgctcaggcccttgaacaccatcctcctcgctgctgtgtcagctgacagaccaagcctccacagcccacactgaacgttcgctcccactggtcttcagactctttaatagctttctgatagtaggaaaggtaacagttggtctggctcctaaaggcttatgaggtattaagccagctcagaagtctaggtgctattaaagtcaggaaaggagaatattagatatcattcctgcactctgcagtagcaggccatatcagcagcacttgctccccctgcccatcaaaaagtagtctccgtctaaaaaagaaggaaaagtatttagagaggaaatcttgtgatacacttgtgcccatgttactgacagtataatgctacaacatcaagcacagaaagcccagactttgattatcaagcattcataaactttcaggagccttatagcagacctggtgaatatccgcaagaatgttttattttaaggtattatctttgaagcttcagtattgtatgtgtttgtgcactctcttaggagaaacagatttttgtgcataaggactacagtctgaaagtctgtctctttctctggtttgttaaggaccaagaagctgataattgatgtgatccggaaccagccagggaacacattgacagaaatcttagagacaccagcaactgcgcaacaggtaatttgactttaagtgtaaaataataatagacaggtgttgattttcttcataaatctttatgccatatgtttattatctcagagaaactgtatctgacatggtccggaagtaaggaattttatctattactgcagtggacttagttcagccatatataaacctgtatgaagtatcaatgggaatgaaatagaaaatacagcaccaaattcatgccgaatatacttttgtcttaacctaggatgatagttctgggtttttcaaagcccggaaatgttcatcataatgggcaaataagtcagttgagagagttctagctgacaggatattgaaaaatacctttcacattttatgtatttactaacttgaaacaaataagcgactcacatgttaaagatgttttccaaatgcttcagaagcaaatgttgagtccactgagtcaaagcatcattatgttagcgtaagtgaggtttcacaacaatcttgcatttagctttttattaacatctttgaaaatacgtcattgttcgttctaaaataaattcaaggttgttattttagtaccaataattgccgctccctaaacaaaagttaattatttaattaactatttcttagcacagctacacataattttcctggatcattcttaatttaattgattgccaaggaatccttgtaatagtttttaatttaaaaaatataaaaggctgggcatggtggctcatgtctgtaatcccaatactttggaaggctgaggtgtgtagatcacttgagcccaggagttcaacaccagcctggacaacacagtgagacccccatctctaatttttaaaaatttttaataaaaaatgtaaagcaaaacttcaaatcacacgtttgttaatatgtgggtatgttttaaacaatgtgggtaaaatattatactaggttagtataaaagacttttactccttactatttttcattttcccctaaatgtatcatgaataagtgactaagaacacagacttctgagatcaactatacctctgcacctcctaggtgtgtaactctgtgcacttagaagcattgctgtgccgcagtttcctcaactgtaaaatgggtataataatagtacccagctcacaggcaggattaagtcaattaaacatgttaagtgggtacatctgtatctggtgcacattaagtgctcaacaatgttggctgctgcttttgttatttactgctaacctggtaataatgttccaataatattgacctacctgtcctgtgtctaagattactgtccctaactaatagtcgtttccttagacttcatctattgggtcagtcaattgtctagtacaatgaaatgggaagaccaatagtctctttttgttactgtttccttgaacagactatccaaagagtattcattcattcattcatttactcatcgtttgggaatttataatgtgctagaatattcttattccctttggctcaaagaaactttgcaagtttttcagagttgctggtttgtgattcccttataagaataaagctctctgactgccttactgttggtttagtttaggactctccataaacatggctgatgtgtgagagtttagctgggttctgaacattcagggttctcatagccacatttcaataggtaatctagttttagtttcctcagctagcctatccaggaattgaaatccttccatgtggggaacaaagtagcagttatccattaaaatatgtccattactatagtgatttgtcaccttggcaataaagtagctattgagaatttttcccaaataaggcttgctatcgaaaagatgaagtaattcctttcaaagacctacttcaaaactcaggaagaacatgttctggttctagtctctgaactttggctggaggactactttcattttgacattaacttgcattgtgtagcttatgaactgtgaaattaggggatcagagaaaactcagcatcttgatattctcttttcaggaggtagaccatgccacggacatggtgagccgtgcaatgatagattccaggactccagaagaaatgaagcatagccaatctatgattgaagatgcacagctgcctcttgagcagaagaagaggaaaatccagaggaatcttcggacgttggaacagactggacacgtgtcatccgaaaataaataccaagacattctcaatgagattgccaaggtttttggaaacagtattctttcttccttcacttagcagacatttgctaatcaccagtcaagtgctgggcactctgtgaggtggcattagggattcatggttgcatatgctgtggttactgccctcttcaatgctacagatttttcaaggtttcaaagcagttgatgactttttttttttttttttttttttgagttggagcctcgctctgttgcccaggctggagtgcagtggcacaatctcgactctctgcaacttccgcctcccaggttcaagcgattctcctgcctcagcctcctgagtagctgggactacaggcacgcaccaccacgcccagctaatttttgtatttttagtagagacggggtttcaccatgctggccaggctggtctcgaaatcctgacccggtgatccaccggggcctcccaagcagttgatgacttttaagagaaaacaatcacaacactttcatgtcattaggagagttgaaacagaccagaaataaatactaaaaaatgtacttgacaagtttggtctatacctttaaagttttaaaaataacactattggaagagttttctcctgagatgttagttgtcatatagctcagttgctcttagaacctgccactgagatggaactctgtgtccctgatcatttgtttttaagcaatttagcctaaatgcagttcagacttgaagattagtttctgttttcttatccaatatttttacacttgagaaacttcctgagcaaaggatctcaacttagtgcaatgaaacatcacaggaagtggctgagatctgtttgtcaaggataaggaagtatatatttgggttagaaggatatttcattctttttattcaaacatgcaaattaatatggatctagaggttaaaggcagttaaatgaccagaaaaaaaaaaaatttctcaccttctggaagggaaatgcgctcagctttgttctttgatagaaaattatgttcaattctggcagtaggcttattccttctagcccaagtgactcaagggaaataacatttctttctttagtttgggggtagaaatatttctatttgggaatatggggtagataaatatatgcttttgctttaaaaaagaaaaaggctatcatgaagacatgatattctatttaatgaatattctattatatgaagaatttctatttaatgaagaattctatttaatgaagaatattctatttaatgaagaaattttacctaagggcatggggaagttgtgggggagtgtatgtgtatgtaggtatttctttgaattcctaggggaatggtttttaacttgtttacaaaagaaaaataatattaaacaggcaccgttttcttaagtcaaacattttcataacttaccaattagaattatgaaaaaaacttatatctgcaagtttaaatttagcatagctcttgtaagctataagcagcttatgcaacttaatgttctaggaattctatttaaatccaagtaatagttatcaatgttgaatcttttcactcagtcttgacagcccagtgttgttttttcaaaccttgggaaatatttgtcagatgaaaaagtttgttcttttcttattttaaaaatgaatttaacaattaaatgtaaacttttttagtttaaagtactattcaaagaggaatattcaaaatagtctgaagaggctgggcacaatgtctcatgcctataatcccagcacttcgggaggccgaggcgggcagatcacttgaggtcaggagttcaagaccagcctgaccaacatggtgaaaccctgtaactactaaaaatacaaaaattagccaggcatattggcacgggcctgcagccccagctactcaggaggctgaggcaggagaatcgcttgaacctggaggtaaaggttgcagagatcaggccactgcactccagcctgggtgacagagcaagactatgtctaaaaaaaaaagtctgaagaaattgcatttctgctactttgtgccccttttaaaacgcaatttttccttaaactaaatgtgtggttattctaaaataacttctttgcctttccatccagagcaaaattaatgttaacaagtctcttaaagtgaaatatgtacactttccagttctgaagtaaaaagggatgggaaccctgtggtgttgagagtaaaataaggtgcctgagataagctacaagtcaagttacaaatagcgacttactactgcttgatattcttcttgtcccaaactggcaatatcataaagcaaacttctgcttaaatatgataccccttacttgttgttttaggatattcgaaatcaaagaatctatcgtaagcttcgaaaagctgaattggcaaaacttcagcagaccctgaatgcacttaacaagaaggcagcattttatgaagagcaaatcaattattatgacacctacataaagacttgtttagacaacttaaaaagaaagtaagttaaaatcatgtcatgttcatttgtaatgtcatgatttctatgagatgtcaattctgtgtttctaggcagttgggttgggtatggaagaaaactttttgctctgtcttctaaccgaaaactagagtctcagttttattatttgccactgtgaactaagaagtcaggagtaagtgaaagcttttcaattccccaccagcactagaattaaagtggcttacctgttgtatattgagcaaatagcattagtaagttagggaagcactttcattattccttttgtcttttttagccaaagatttttttaaatactattatttttaaagtctcttgtttttggaatgtattttatataattgataatattagataatgccaggtgtttgctaattgcacagagcagctgaatgtttttaaattgcttcatggttttaaaaaattattgacacaactggcaaaatttggcagctgtctattatccattagcataagtattataggtttttatatacagtatagccatttttaatgaatatcctttgcttagtaattattcttatcactagactatgatcaatgctagttaaattttaattacccatttaaatatgtagtacaatatttttatataatccttgtcatcaaattggcaggaggaaatggtgctgtatggaaaaatctgttgcattaatcatagatcttttaaattttattgcaaattgactataattttatgtattcctggggtacaaggtgatgttatcatttattattacaatgtgaaataattaattcatatatgcatcacctcaaatacttagtttttgtgataagaacacttgaaatttactcctagcagtttttaaatgtgcaatacattattattagctatattcaccacactgtgcaatagatttcaaaaaaaaactgattcctcctaagatttcatatcctttgaccatcatctccccgtttcccccaccctccagcctctgaaaccaccattctattctgcttctatgagttcaacttttttagattccacatataagcgagaacatgtggtatttgcctttctgtgcctggcctatttcacttagcatagtgtcctctaattctgtccacattgccccaaatgtcagaatttctttgttttagggccgaatagtattcttctgtgtgtatatataccacattttctttacctgttcatctgttagtagattcttaggttgatttcataacttagctaacgtgtgagtagtgctgcaatgaagatgggagtgcagacatctctttgacaaactgatttcacatcttggagtaaacacccagaagttggattgctgaaatcacagaagatttgataaagggatgcagccacatttaaaccttattgatttggctcccactagtcctgaattttagttcatttgcttcaggcttctctctgtttctctctctctctctctctctctctctctctctctctctctctctctctctctctcactctcgtgctctctctctctccatatatagttcatttgcttcaggcttctctctgtttctctctctctctctctcactctcactctcgtgctctctctctctccatatatagttcatttgcttcaggcttctttctgtttctctctctctctctctctctctctctctctctctctctctctcactctcgtgctctctctctctccatatatagttcatttgcttcaggcttctttctgtttctctctctctctctctctctctctctctctctctctctcactctcgtgctctctctctctatatatatatatatacaaaaatacactaaatatgtatatacacacactacatatagtgtgcatatgcacttataattacataaacatatacactatacactaaatataggaaggaaggaagaatatatacatatacatgcaaggaagaagttggtcaagcttactttcagtagaaatgagattgttagggatttactttaaggcatttcacacaagatccacagtcgggcgaattggatttgggttctgattctctcttatgtcgtgtgatcttgagcccagttcagtgaactttgagcctcagttttctcatccttaaggtggaattaagagtaccagcctcaccagcttggctgacgtggcgaaactccttctcctctaaaaatacaaaaattcgccggatgtggtggcatgtgcctgtaatcccagctggaggttgaggcaggagaatcacttgaacccgggaggcagaggttgcagtgagccaagatcacgccactgcactccagcctgggcaatagagcaagattccatctcaaaacaaaacaaaaaacctccccccaaaaaagcaaagagtaccagactcacaagtatggttatgagagctacatgatatagtatatagcaaaggaatttattagtttaaaagtactatggaaatgttaattttggaaatgtgaggtaatatttataaggcacttagaacaatgctagccacatagtgtttgttaaatagattaaaacagtcctagtaatatcgttatctaggaatacacagttcatgttattgcaccaaagctacttctgaaatgactaaagatagccacttggttcaatatacctgagaaaatagagtgtaagttttattaaaaatgttagtctgtaatgcaaacttcagtcacttgggaaatccctttccccacaaacagtttagtagtgaagttgcactctatggacaaaattacctactatcacaaaataaaaaagtgtatattcagcgctctgagggccaggtatgaacagcgatgtcactctgagtatggtaatcgcactaccagaagcctctgcatttgccatcataacaacaaatgttctgttcttattttgtcagaaatactcggagatcaattaaactagatggaaaaggagaacccaaaggggcgaagagagcgaagccagtgaagtacactgcagcaaagctgcatgagaaaggtgtcctgctagatatagatgatcttcaaacaaaccagtaagtgtgacctggaatctgcatagaacacgcatgccatttgatttcttgtggccttggagagagctccatttggtctagcaaggcttaacctcaattactgatgggtgacaagggaagaatacacaaattgttatggctactcttcccttggcctcagcatctggtgctgtcagtcatatgtagtgttgatcagtggttgtctttcccgtggcttgtgcaatatgtttggattggtgaacctccagaactgagtcatagcaatgagagtaaaaggctgtcttttggtcttgatggatgaattatctaccattgcaaaatagcacctttctcatttaaaataggctgtgccaacccctggatcagagccatttccaaagcatgctgtgagtgtgtgtattcggtgtagtggaaaaaacaaaccctccttcacagccccacatcaggcaccatgtgctgcctccttttaaaggggtcatgagcccagtgttccatcactttcttgtcctaaaatctcaagggaagccagactcactggcatttgccttttctttaactcctgccttccttcaaagcctgacttctgtttatcccatgaaacctcctgacaacaccaactcagaagaaaatgcttcttccagagatggagtctcactctgcggcccaggctggagtgcagtggtgggatcttggctcactgcaacctccacctcccaggttcaagcgattctcctgcctcagcctcgcgagtagctgggattacaggcacatgccaccgcccagctaatttttgtatttttagtaaagatggggtttcaccatgttggccaggtgatccgcccgcctcggcctctgaaagtgctgggattacaggcgtgagcgactgcgcctggcctgaagtttctataaaagttatcatctgaaatactcaattggctataggtcaataatgttcatgttctgtgactcacatatttccaattatgttttatgctcttgaagagcaaggaccgtatcttctatttcttttgtaataaagcacctatgtcagaactctatgagctacagatctcaacaatagccatcaaacctagtgtttggagagcagaattgggggaaagatgacgtgaggtttttggtgacttccttaggattttctcaacaagccattatttaaaaatgattatttgagattccattagtttgtttcagctttaagcacatctgtatttgtaatttctcatgtatgaatgttcctttcttcacaggtttaagaatgttacatttgatatcatagctactgaagatgtaggcattttcgatgtaagatcaaaattccttggtgttgagatggaaaaggtgcaactcaatattcaggtaagctgctggaatttctgcacattgatgataaattttatatgtggatcatacattgctaccctggctctctctcttcaggacaacaataaagtttaacagaaaaccagtgccagccttatttgccaatatttgttaagtgttgatgatttttaagagctgtgacttttcaaatgattggaaattgatatgcttctagctggcaaaccatagcagtcagtttctctaagccatgtttccattttaaagcttagacaaaagaatataatttaaaagtattcagagctattaaataaatgctataaattttccttttattggaaacttgcatttctttctaagactatgtatgcccaggactggaactttcatgatctcatttttccctctctcctagaatggtttttcttttttgtggggggagggggtgggggtggggcattgagaaggggtcttgctctgtcgcccaggctggaatacagtggcatgtatgcccaggactggaactttcatgatctcatttttccctctttcctagaatggtttttcttttttgtggggggagggggtgggggggggcattgagaaagggtcttgctctgtcgcccaggctggaatacagtggcacaatcatggttcactgcagcctcaacctcctgggctcaagcgatcctcctgcttcagcctctcgagtaactggtactacaggcacacaccaccacatctggctaatttctgtattttttgtagagacagggtttcaccacgttgcccaggcttgtcttagactactgggctcaagtgatctgcctggcttagcctccaaaagtgctgggattacaggcattagccaccacacctggcccctagaatagtttttacgtcaatttattaactctatttgtcaaatgcttgggatcacaggaatgaaaggcattatgcaaaacagatatctatacatagaaaaatggtgtttgcaatataaattatcgttattttatcataagagccacatttaagccaaatacacgtaaatgaaaaccgagaaatccagtttctgtgcaaaaaaaaaaaaaaagagagcactgcaaacaaatgttcatctgcccccaacttcttaatccttagcacaaaaccaatttaaagaagtaatttatttttcttttttgatgtaacactttttaaatggaaataacatcttacctgggccccaaactacttacaaaatggtttccaggtattttgcatatgtttacatgaatcatctcactaagatcctgagagtgatgtgaattctggcctcactgtctgtgcagcccagggctccatgcactggaattacttccccatcatgggagtgtgtgccagagcccttcttttctggcagcccttgtaagtttaaaagaaaaacgggagctgaatgggtttgataaggacattgagataatggagtaaattagaattcggagataagatgaaagctattatgtaattattgaaagtataattaagtaaacagtattgttttctaacttactttaaatgtcactaaatgtatccatttaataatttagctaattagggtcttcagttattttgtgtaacagataaatacaggaagagaaaagaaggtgcttgtggtgataccctttggttagtgattcctctgtagaaatagcaaaagacatatgtgattgccaagaaggaaattatccagggccagtcaatatcaactggaccaatgagtcacaagtgaccaggagacaccttatattgtgtttagagagaaagcaataattccatgagacttcctttgagtactggtataaaaaccaagcttcacttgttcctttgttaaggattctgtatacagtaagattagctgttcataccattcatttatacacataatggattgtgaaatgttaatccttagctatatgcaggtgaccagtatgtcctgggttttttaaatcagtagtgcataatcagaactggctacatccttagcagggctcagagcaaaataaaaatgcagtgccctgtttttaaaattattaaggattttaggatgatgacagaagagaataaaaccctgggcatgggaccctgtgcggctgcacagattgcatacccacggagccagccctgcatttgatagctgtcagatgtaaaggcagacttctatttatatatgcagctttcagtcaattgcatgaatgtgtaaattgtcaaagagaaatgtgatggccaggtccttactgtgagtaaaggaccaggaacaggaccaaagtttgaaaggactaaagaaagccccttctaacattacagctctatgtctcttggttatcttcagcccattttcccttcagttcctaaagaaaaccataggatagaattatatcctataattataggccatataggtaacaggaggatatgacttatgtgatatatattcttcttgtaaaaataatgtcaggtatttatcggggactgcagggtgggccttcttcctctcctagatgaagaactgaggttcagacagctaattatggaagataattagctgggataattatggaagataatgcagctgggatccaagttcttcatcactctagtccactgcctgtctcataggattccagttgatcctgcaagacaagagtagcttacaaagggtttgcatataccttaatctcatatctcattcccagtagcacccttgtgaaattggcagtgttatccccaatttacacacagggaaacagaacttcagagaagttatgtcatgttgcaaggtcttaagatagcaaatggcagagctaaaactaaagtctgcttttcaagtcatgagtccagccatgttttctctgctccctactttggggacccagctacttcccctacatatgccattccttttcaatctaactctattggtttaattcttttccactagactttgtttaacagatgttgcatttcccagaggaaaagtgaatctcctctacactctaaatagctaaaagtattattgatgaaaggacttcaattccctatagaattttagttctagaagcatatctgaataatgtaggggttttcttaagtgcagtgagaggtaattgaggaagtggaggaggaagctgccaagagtcagagttctctcaaagatgactccaacttctacaattgaccttgctagaaacaagaaaatgagacttagatattgggccaggacagctcaggaattatatcttccattgggaaaggcttcctgtacctatgttactatgaaatgttacagcttagtttcatgcatatggctggtgtgatccagttacttattttaaaaagagagttgatttcctttgtttatatgctggcagtgaaaaacagaatgacagttcgacttaagaatgagggcttgttctcagtacagaaacagaagtagcctagttcaagaagtgcggaccaccgctttgtacaatggtctccaaactttggtcacttcatcaggaaatagtatgagcacttctctccatacatagttatttgtaaagtatacatgcttctgctattgtactctaaaacgtgctgtattatataccaaaaaagtccaaaaaatgagaaaaaataaatagaaataggagttctaatattctttttgcttccccagtgaatgtcttgctcacttcactttaaaaaaacactgctttctgtgtttttgtttttgtttttgtttttgtttttgtttttcgggttttttgagacagagtctttctctgtcgctgaggctggagtacagcagtgcaatctcggctcgctgcaatctctgcctactctgttcaagtgattttcctgcctcagcctcctgagtagctgggattacaagtgtgcaccaccacgcccagctaatttttgtatttttagtagagatggggtttcgccatgttggccaggctggtctcactctcctgacctcaagtgatccacctgcctcagcctctcaaactgctggtattacaggaatgagccaccacacccagccagaaaacactgctttctaaagaatatgcatctagccagaactttgtgttttaacattttcgattaaaaattgaaattatatatctgacattaacttaatgatcatcatttactttcatacagcccttatcaattccaaaaagctattttctttcatctaagtcacaatcacttgggaatttattaaaatgcaaattgatgggccccaccagagagctacataacaagaaattcctgtgggaggagcccaggcagcctttattttaactagcctatgtttttaaccagatgattctgatgtacacttaagttttagaacccccatctatggcctggtgccatggcatgcgcctgtagtcctggctactcgggaggctgaggtgggaagatagcttaagccaggagtttgagaccaacctgggcaacatagttagaccccacccaggtgattaggtcaattgaatctgacttttgtcaacaaattcttctaatatgttttttaaatgcacaaaatgtcaaagttgagatttaatgatgctttttacaatttcaggatttacttcagatgcaatatgaaggagtagctgtaatgaaaatgtttgataaggttaaagtgaatgtaaaccttctcatatacctgctgaacaagaagttctatggaaagtgaagtgcctacagaaatttcttggattctgtatcatctggattaggaaatgaatttgtttaatatttttgtttttaaacatgattgaaatcactgcttataaatgtgtgatttttttaaaacgaccaaaactgttctgaagaatgtacccaggtgcctttttgctaatttgatactataatagaatgagacataaaatgaattaatggaaacatatccacactgtactgtgatataggtactctgatttaaaactttggacatcctgtgatctgttttaaagttggggggtgggaaatttagctgactagggacaaacatgtaaacctattttcctatgaaaaaaattttaaatgtcccacttgaataacgtaattcttcatagtttttttaatctatggataaatggaaacctaattatttgtaatgaattatttagacagttctaagccctgtcttctgggagttatcaattttaaagagaacttttgtgcaattcaaatgaagtttttataagtaattgaaaatgacaacacaataacactttctgtataaaagtatatattttatgtgatttattcctactaaatgaaagtgcactactgcctcatgtaaagactcttgcacgcagagcctttaagtgactaaggaacaacatagatagtgagcatagtccccacctccacccctcacaatttatttgaatacttcaattgtgcctctcaattttttgtaatgctaaaaaatcagtatctagatggtttttaaatgtattctctggaaattgttttatgtaaaataaatgttacttaattccattaa

SEQ ID NO: 693 - DNA, 54399 bp, Homo sapiens
ctccaggagactcagcactgccctgttccttcctagcctgagtcaggactgagcagagaatcctccaccacacacagcaggcactatctgccacagttcctttccccgatagcttcaaattctctgccttttgaaataagcctacttttaactggaataaataattggtcaatctctacctcaggtgaagaggaaccaagcctctggaaacacttaggaacaaactgtaaaaaccaaaggcaattgtgtaaccggttaaataagcttgctggactttgtccctgtgtatgagttagacaattctttcagctagtttgagtgacgcactgaccagtgaagcgcagtgaagcagtgggaaccggaatatccaaagagtggtttgaaggagaaagaagcattgtggctttatatcctctgggcctgggtttcctgaagtcaccacacatagaggagagagaaaatggctgagttaaaggtaagaaaccatctgacaagtttgctatggcttcttcagccaaaatttatggaagtttctgagaacttcagggtatcagagttggaaaagacttagagaggccctggttcaaacccctgtgttcagaggcttccctgtggtgtctgtgggcacagctggagctgaagaacaagggaaaggtgataaaggaaagaaatgaagctcttattggtcatcccttgcctttgttcatttcaattattgtcttggaaatctgtagacatcctaagagctcccctccactacggacatgcacgtttctctctatgtctttttcccaacccctgctctgacaccttcccattgctgcagcctcatggaccacttccggtgaccagttagatatgcttgatctatttagttaattaaggctctgaatcagcccttggccagaagaagcacctcctctaggaaatcattccttctttttagtaatacgcaattgaaaagtatgtgtgggttatgtgctgttaggtgctaagcattttagctatgaattaactcataatcctcaaaataaatctggggtatagagagaggttcttgtttcaattagaaaagtaatgcttggagagactatgatttgcccaaggtcactgccaatagatgacttgattagaagcagggtatgtttgaatgcgaagtccaggctcaaaaaggggccttagtggctcctactagactggtatcttaaggcaaggaaaacagaatatgtccctaatatctaaaaccatgcctagtgcccaggccaggcttgaatcaatgctcaacgcatgcatgtgtaactgaacagaactgcccagaaccttggctcaggccaagtaggccagaccaccccacaacagacatcttccctgaatgcagggtttgagaagtgccctaatgccctctaactgatgctgagtttgaagaatccatcagttaaggggaggtgtttctgagtttgaagaatcaaacaccttcctaattggtaggaatcctgaaaacactccacaccggagtaaaagactttggttttttatctttatgcctgactaaaagttaactctcattctttcattcagcaaatattttgtgctagtgcatgacactgcagattaatatcgtagatgaactgagtctgggctaggtagagtcaaaaaaaaatttcctaaaggagcctgtacctaaactgagtcttcagagagaagttggaactggcaaagtgaggaaggacggggtctggagggaagagtgagtgcaaaggcacagcacatacagaatgcctgcatgctctagaatccaaaactgtgtcagccaaatttgagttgatggagggacagccaaactgagatacccaggcggtggttggatttatggatctggatttcaggggagtgggcagggctaggggaatagaactgagggtcatgatgtcagtggtaggagttgaagtcttggaagaaagagtagatagaaactttgttttctgatgaacattctatgaggaagttcagcagaggttggaaacatctttaccatttataaataaattttatgtaaaatcctatcctgctgtcatgtttaagcaacttattatgcacagcaccaggacatcaatgtaaattgcatgccagtctttgctctcagtttcaaaggcattcttccctgcctgctgtctaatctttacaaagaaaggttaactccagaggtcaggaatctgaacacagaaaaccagattgcatcatattcattctaatcaataaacattatataatttttaaaactgtttctcatcttttatttcttcattttaatgaatatgtcaacacaaagccgtaaatgaaatcacatttacacaaaagtacaactggggtaagaaaattcaaaagataaagtaataaaattaaatttaaaatgaaataccctatgtatttgagtaagttgcttagcttctcccaaccttggtttcctcatttctaaaacgaagaacttgcttaatattcaggctctgggccccaccaccaaatccttgattcactggctctgggtctgtatgtaacaagcttctggagtgattctaatgattagccagagacaggacctactattctacgtaactgatttcctcttgctgctgtaaaaaattaccacaaatttattggcttaaaacaacacaaatgtattatcttgaagttgtggaggtcagaagtctgaaatcggtttcactgggctaaagtcgaggtgtcagtgtggctgtttcttctggagactctatgagagattgtgttttcctgccttttccatggattctgtttcctcttctagaggctacccacattccttggtttgtagcctcttcctcgatcttcaaaaaaatgtatctctgcttttgtaatcacgtcacattttctcctcttataagtcaaatctccctttgcctccctcttataatgacacttgtgattacatttaggatacacccaaataattaggatatctccccatcccaagatccttaattatatatgcaaaagtctgtttggctagaaaagataatactcacaggtttcaggggttaagccatacatatctttcagagtgagccattagccattattcagcctactgcgataatgtgcaagttccctttacaatctatgttctatgttcccatcaaggttaattagaaatattagactctttttccacagaaaaaaaaaatgtagcagtagtttcatctctaccctgacttctctctctttccttcatgcccagtaagaggaagtgaggtgcaccatctgttcatctcatcaggtgttacctagaatcagagtcaggagaaagcacctcataaaactactctgacaagtaaaccatatcctggggaccaggtgagaattaaaaagctgtatactcataagctgccaaagagctgatggtactgaagtcacatggagctcaggaatttattcttgcatttagaaagtatgcatataattctctcgaaaagaaatgaaatcatatttttctgtcggatcaaattattcagaaatccgaactgtagaaaacatacaaacacacttgcttaatgttagctttttaatcttatttttgtacacagtatacttttacataggcactgaaccagctggaaatgaatgcttggattttcgcagctgataaaagcagagttcagattctgtccttgagctcaatgtctggagaaagcagctgtgaatactgcttccttaattcagatgcctttggccgtgaggggcatggcattttaaagctgcaataaactctgtactttttctctcaggggattagaaaaaccaattgatttgatagtgactcagcagttttcaccttcctctttagccaatgccctgcagctaagattgagaaacggattcagaactcacacctcttggtgcttggtggctcccttccaaaccatcagctgttctttctactttctttcctattttttaaagcacagtctgaatcaagtgcttcagaaccatttatactaactcgtgttccaaacacataaccctgaaccctcttctaaggccaccagttacaaagaatggggaaggttaatgagtaactccaccagtgcctgccagaaagctcagctgtactccagccttccttcctctcttgcagagagaaacaatgcggcagttgaacaaagcgaaggcactgtaatgcccagtggcttcagtcacaggctggtctaaaattccatttcacagaattgaagataatttggggttattaccaattctcagcagctcaaattcaatcccgttgatggtgagcatggggttcattttgagagtagaaaattggatgcagtggagaatcagaatgttggatggtctctgccatttccccaaagatatcatcctaactgcatgctgctgcttttaacaaatcagtatacaacttagtattttttgtgttgacaaattttcaaatatacaaaatattgagtctgaaggcaaaaagaataatttttcacttccattgcttcctaggtcataacattcacatctgatatttcttccaaatacagactgttgttggcctgatcatcactcacacatccaggcttgttacatctccacgccactgagtatcagggaacctgccccaatattcacgtaggttcttttctattttccctaagcgtcggccaactttagaaataaagggacagagtacaaaagagagaaattttaaagccgggcatccgggggaggcatcacatttcggtaggttccgtgatgccccacaagccacaaaaaccagcaagtttgtattagggattttcaaatggggaggcagtgtgcaaataggtgtgggtcacagacatcaagtactttacaaggtaatagaatatcacaaggcaagtggaggcagggtgagatcacaggaccacaggaccgaggcgaaattaaaattgctaatgaagtttcgggcaccattgtcattgataacatcttatcaggagacagggtttttaggatcaactggtctgaccaaaatttattaggcgggaatttcctcttcctaataagcctgggagcgctgtgggagactggggtctatttcacccctgcagtctcgaccataagagacaggcgcacctggaggggggctgtttataagcctatacctcctggctcgtattctctttctcagggatgttccatgctgagaaaaagaattcagcgatatttctcccatttgcttttgaaagaagagaaatatggctctgttctgcctggctcaccagcagtcagagtttaaggttatctctcttattccctgaacaattgctgttatcctgttcttttttcaaggtgtccacatttcatgttgctcaaacacacatgctgtacaatttgtgcagttaatgcaattattacagggtcctgaggcaatatacatcctcctcagctgacaggattaagagattaaagtaaagacaggcataaatcacaaggatattgactggggaagtgataagtgtccatgaaatctttacaatttatgtttagagattgcagtaaagacaggcataagaaattacaaaagtattaatttggggaactaataaatgtccatgaaatcttcacaatccacgaacttctgccatggcttcagctgatccctccgtttggagtcccagacttcccgcaacaactgagaactctggagggcctacccttcacccacttccacccttcttatatctcttaaggagctgtgttcagatggttacatttcgcttgctgagcaagactgcattttcattatcctgggctaaaatcaattggtatttaagttagagcaaaaagggttctaaccctatttacagcagcacacatacacttacattagaattggctttaagggaaaaattcaatcaatcgacaaatttccactgattaccttctatgagccaagactgccatagtctcagccttcatgcagcttataggctagcaaaaaagccagacagtgcacaagaactcacaagtgtgttgagtgttgcaagagtaagtttcaggggctctccatgacttacctggttgagaaaccctttaactttttttttcctctgggtgtaaagtgaagagatggcaatcagagtaggttccattgtgtcattgtgaaaagatgctgggctggcgtgtctcctgaaggccacccatatctttaaactttattttcatgcattcgcacaaatatagatgtgttccatagatgaggcagatagcagaggcttctgcctacagcaaggctagtttggagagggttttgctgtcagggttggacccacacacctcttcatagatgctttttcttttttttcccagagtttgaaagggaaatggagtctcaagttcagggaggttacagtgtagacccacaaatcagctaagtacagctaagggtggagaagtctatgcaatatccagcactcttctgattaattagaagtctttaaaattcacagaaaccatattgtcttccctaaatgattcatatgtcaagacacagtaaagatattatatgtggaacatcatacacaaacataggtccatatagaaattcttaccttagtaaactgccaattttctgaaatgctctttaaatcctgctaatggtggcatttgtgtctttgtcacctacagtacatttctggatttgggaatgagtgttcttcagaggatcctcgctgcccaggttccctgccagaaggacaggtatgagcaaataaagtgcttagaagagctctgaatcctattcctggatgactagctttcaggccaaagtgcctccacccaccgtggctcttccaatctagcctgtgaactgtctagaggtttcccaagtcataggggcaatgaagatacagagcaatgacaacacaaagattaaaattggattggtggcacagcagccaatccaaactagtgaaattaactgtagggtttccagtaggatccccaaaaatccagagttaaagagaatccctcatattccccttgaacaccatggatgtgagcattatgataaaataacaaggtgctttcacatgtatgcacaaagatgttcatactagtgctggttagaaaagcaacaacacgggaaacaaaaatattttcaaaactttttgcaggccgtatcatagcataaaaaaatcctcatttcttaaaaaaaaaaaggaaaaaatgcctgattattacagggttacaggtatgatagggtcacaattttggaggataagaatgcaaggaaaaataccaacatgtgaacgcttggttatttctggttgtgagataatgggtgttatcatatagtttatacattttctacaataaatatatattacttttataatcggggggcaagtcacatcaaaagttgttacaagaaacatatcgggttgcagatggtcatgtgcagtcgcccagagcatccccatccccctactgagttggttggtgggaaggtgggatgcttttcggatgggagtaatattgtttattgcatcctttgtttcagaataatcctcaggtctgcccctacaatctctatgctgagcagctctcaggatcggctttcacttgtccacggagcaccaataagagaaggtacaaggattagatgaattctgacctgcagactgtgggtactatgacagggactttgtgctgcctccttcccctgggccacagcctcccagagctgcccaagatcctgcttcttataggctatggtctgggtcatggtcagaagagaatgaacttcctgccagctagcaccaagtgactggtggaagaaggtgaaggaaagctgcacagagctgggaaaatacacatgtccagttccatttacaaattacctcctatattcagaaggaaatattcctaatagtttggtcttcttctaaagactgtcctgttgagttttggcttggggtttacctgttttgttttgttttataatgactaagtcacaattatggaagattcagagcaatatctttctcagctgactagaggtatgttctttgcaagaaaatgttgggtaaacgaagtttggatagttaaaaagtcacatattatggcccactgtggtttgaattaataaggtttttactctggtattcgcctttgctagaaaccagcatattcatttacatactgtgccatgttccatgtttgctctaatcctacatccaggtcaatgaacgtaatcccttgattaactcatatcaggcaggttggatgcagtatgtgttatagttttgggaggcagtaagtgttatgatttaaacaaatagtgtctaattataaaaattttaggctgaggtatttgtgaagaggaatgctgctggtattagagactcggggagaagggcatgtggtcttgtactgcttagtagggcagcctgggtttatctccacaggtccttctgagaagcaaatgagatagtaagtaaaaaactataatggaccacacaaatgataaagattgcaaggtttaatcatggccaccctggaggcaggccccctaagtataaatcctggctccttttccagctgtgtggccttgggtaaatcatctgccctcttggatcctctagttcttcattcgtaaaacaaagataattatggtacctatttcatagctgtggtgaggattaaaagaaaggatgtgtgtaaagcacattagcttagcttagcacattggcacaggcacatggttagtgctcagttaatgctagttattgtcatgataactatcattaagtattgccatcatagcagagtttctgcctcatttccagggtatctctaggaggctgtcaagagaactgggcatgatatgtggcaagtgctatgttacaatgtcagtatcaacagtacttttctctcaatagatatatgcgtgggaagaggaagagatagagaaagatttctatacatgtcaaaaatcaggggataattccttcactatttaatcatctctctctctctctctgtaagcccaaatagggtaagataagcacgcagataattctgtccattctaatttatgacaacctgtcctctatgactatgttcttgactttatggcccattccctaacaggccacctggtctccggattctgcagcctgtccccattattcagcaatatcttcagccagcaggagctgagctttgttccagcaggctgaaaaggagctgttggcatttcattaagaagctggcactgttccctgaatcagaattaaatctctgttcagggcaatgtagtactgcctggggagttttataaactcagctaaaaaataagggacactaggtatggctcacccatctatttagaagaactctccaaagatatccacaagaattttgtggaaatgcttcccacccaaaatctccagtgggaaaatgggaccagtcttatccataagtaggccagcctgaaattcttagttactactcatctgaaccatagcatacagggccaccacaaaactattaaagagtctatctacctacctacgtacctacctacctacctatcagggattaatttttatcagattagctagctgattgatcccttgggtcttgaaaaggcaaaagtctggagagataatttggaaaatgtggactgtgataaaaattcagaagattaagagaagaaaggcaatttaacaaacacatgataagccagcagctactgtatgccaggcatttttggtacacaaactctctgagttctcacaacaatcttaggtgacaaggatgaagaacataaggttcaggaagtctagtaactctcccaggatcacacaggtggttccaagacatacacacatgctctgaacttcatatactgggagctggagaggcttagtaagaccaaggtctgaggtcacgtcatcaagagatggagaaatcaaatggaaactaaacagatctagccctttttcccccagatggctcaatgttgggccaggccaactcaactcactgaggtagactgtccttggtcttgaaagggccagagcctgttgattcaggtctggtcttccgttgtccttctgtattttgtcagggcagtaccctctgaaaggacttgggtccctcttagtgagcttcaatgtcccttccagcttctggaaggtcttatcctggtgtcctttcagattcctttatcagagtcttcttcccttcctgaagcctgagatctggtcctggtagagaggacacactttaaaaagaaaagaaagaaagacaaataaaggcataaatgtactacaataaaacatggacatacactcttataattttagagtacagaagtgttaatttatttttattttattttaagttccagggtataggtgcaggatgcacaggtttgttacataggtaaatgtgtgccatggtggtttgctgcacttatcaacctatcacctaagtattaagcccagcatacattagccatttttttaatgctctccctcccccaactcccaccccccaacaggccccagtgtgtgttattcccctcactgtgtccatgtgttctcattgttcagctcccacttatgagtgagaacatgcagtgtttggttttctgttcctgctttagttcgctgagaatattggcttccagttccatccatgtccctgcaaaggtcatgatctcattcctttttatggctgcatagtattccatggtgtatatgtaccacattttctttatccagtctatcattgatgggcatttgggttgattctatgtctttgcattgtgaatagtgctgcaataaacatacgtgtgcatgtatcttcataacagattgatttatattcctttgggtatacacccagtaatgggattgctgggtcaaatggtatttctcattgtaggtctttgaggaatcaccacactgccttccacaatggttgaactaatttacattcccaccaacagtgtaaaagcattcttatctctccacagcctttccagaatctttttctcttataaattaatatcaaaaagacaaacccaatagaaaatgataaaggacttctacaagtaattcacagaaaaactataaagagccaataaacaaatagacttgttttttggaaatattttgtattttctaattcataataaaggaaatacaaaataaaatgagatactatttttcacctaaaacactaaaatttttaataatactccagatttgtgaagatgtgggtgaccaggcactctcacacgttgttagtatgataataaagagttaaaatgatctgataattttgtttagaaatgcactggacgtatctgaaagaatatataagaaatatataagaaaatcactaagctctgatgcctctgaggaatagccctgaagaaactggaggacgaaggtgccatttacctttcaggactttttaattacttgaattatttttacctttggcatgtattacttttgtaattttaaaggagaaaattgatttactatttcaaaaataacaaagataccacccatattctctcaagctgcgtagaactcattgttcttgccttccagagcaaggactagcatcctatgatacacacataagctaatgtttttctatggattttcctacacagatatccctcaaggtacttccccttcccttatagtttttagaaaagacaattcttcattttttggcagcatggaaataaccatgagtcagagtccatttgaagcatgatgggtggaatgaaaaagtgagaagaggccagggctgtgggcagcagatggccatgaaaagtgatgctgtatcattgcttcactgcttcacacattagagcctacaggtcgttgttgacttgagtgtcttcctgatggtactgcctgagccattctgtgtatcactcagaacattactctaaggcttgtatatcttgtatgtttttccctctagctggctgtataggattctaccttcagtttctcacaagccctttgaatccattgacgaaggccaagtcactcacaactgggatgaagttgatcctgatcctaaccaggtaacctggtcctgtgaattgaagcttatcatatacccaaagccttgactagaaatacctaaatagaataccatggtcattggaaaaaatagatagttttttaaagtattattttaataaatgctaaagtgtgtctgttttctgctcaaacttgggtggtgtattagtccattctcatgctgctatgaaaaaataaccaagactgggtaatttataaaggacatatttttaattgactcacagttctgcatggctgaggaggcctcaagaaacttacaatcatggcggaaagggaagcaaacacatccttcttcatatggcggcaggagagagaagtgttaagtgaaagggggaaaatccccttataaaactatcatatcttgtgagaactcactatcatgagggtaaccatccccatgattcaattacctcccaccatgaatgtccctcccacaaaacgtgaggattatgggaactataattcaagatgagatttgggtgagacacagacaaatgatatgaggtgggaattttggaaatgatggattgattatgtatatacatattgttaaaagaaaaacctttgacaaatctaatttaacagagtttaattgggcaaaggacaattcacaaattattctacctgagccaggataggttctgagagattccagtgcagacactagtagaagacgatttatggacagaaaaaggaaagtgatgtacagaaaacagaaatgaggtacagaaatagccagattggttgcagctcggcatatgacttacttgaacacagttttaatagtgtgtcaccatgattggcacaagagtaggttacacatccaattaggttatggttcactatgtatggagaaacctttaggcagaacttaaaatatgtaaggaggcaactttaggacaaacttgattaacagtctgcgtgtgtgtgtgtgtgtgtgtgtgtgtgtgtgtgtgtgtgcacatgcgcacataagcttgtatttttctagcctaatggcatatagatggacacaggagtagttcggacttactagaactgctcaggtgaattggatgagcggaaattttataggttggtcaaaatattttatattttataggttggtcaaaatatctacatgctcatggttttttttttgtttttaatctaaacttaccacaaaatatagaaaatacattcaatacagacatctttgaagagaggcctttgaaatctggcataggggtgagagtcttgctatctgggctgaattatgcaagtctattgtggtcacagatcactatcacagtctcttcagacctaggacttccattctttttctaggagtttcctccttttggtctagtaatagtgggcgttttctctaattatcgttattacttacgtactctgcttgcagagtatataagataaaatgagacagaaccagtactatagcaatgagatagacccagtgctataaacgactgagctctttttttaaccttctgagaaccccagtgtattgcctttgtccctgagtttaggtacatgttgctgataataggtatgtagggcaggaagaaaaacagacctgggtttgcatccctgcccatctacttactagctgtgtcttaagctatgatgtttcaattgtaaaatgggatgataacatttgcctcacagtgctattgtgaagattatgagagaataggtgtgaacctgcttcatacaatgcctggcatgtgataggcaagaaccatgattctgatacagctatttatatttacctgaatttacattattcaggtaactttatttcttcattttatattattttttactctgaaggcttcttctgccctctttccctccctcctactctctctctcctccctctctccccaccccgccactttccacaacccaaggaaatctcctgcttcccctttgtttaccatgacattttgtctatacctgccaatctccctcccctaagtgcttagactttttataagacaaaagtcaaaataatttatagacacctttggtttcctgcccagttctctctcttgtcttaattatggaaatctcagcgaaataagcatctgcttgaatgttaccacccctctctaccagggacaggaagggagggaggcatttagggtggaaaaatgtgaattggtatttaaaatactatctacctcatagccactttgaaactaagatattttgtctaaataattgacccttaaactcgtatgaagtttaatgcataaagcagacatcctccctggtccccagctggcctatatattgcctttaagcacattgcaaaatgcagcccctattctaacccccaaccccttagactcagtcccccacacaaagggacacagacgaggcattcagctcctccctttccccttcagtgggacaaggcccttgcacagggcacagcttgcacaaccaacctggggaccctgacttcacctcattcctgagtctcatgtggattcaagtaatatgggtatagtaattatgtatatgaagttaactaaatgagggattataagaaaagtccatgggcagatttggataatttaaattattgtttatttataatgaaaaataattatttattattattttgcttcaagatagcaatcaaatcagtagtggttaacagggtaggctggggagttccagggctcctgcctgctcatgtcgatcacaacaattttctaagcctctcaaccttaataaatcttcatagatctgtttatagttgtgtggacaacagtggagccatacttcttttacatagttttattcggggtgggaggttaggttttaaacctaacctttaaagaaaatatgtgatgtgactctactttgagtgtgatgtgtaatatgctcagtaatatacctttattatatattattatttccttgactatcattgctacattttatttaacatgaatacaccctttcataggaactattttggagttcgtgtgacatatccatggaagacaatcttgttctaatagaatttttctagctttgtctttttttttttttttttttttttttgagacaagagtctcaccctgttgctcaggcgggagtacagtggtgtgatcacagctcactgcagccttgacttcccaggctcagatgatcctcctacctcagtcccctgagtagctgggaatacaggtgtgcaccacaatggccagctaattttttgtatttttggtagagaaagggttttaccatattgctcaggctggtctcgaactcctgggctcaagcaatctgcctgcctgagcctcccaaagtgctggaattacaggcatgcaccactgcacccagcttagctttgtctgattgtatgagtaaaatatacttataaaaacccaaaagtattgtagaaattaataaaatattactggacgtctcccatcattaagtgagagtcaagtatataagttgtacatgttaattcattatttcataaatagttgacatacattttgaccaggaagtttgaagcaactggattaaaaagcttgagttaatacagaggcatcaaaatagctgtatcagggtgggcatggtggctcatgcctgtaatcccagcactttgggaggccaaggcaggcagatgacctgagactgggagtttgagaccagccttacctgaggtcaggagatcgagaacagcttgaccaacatggagaaacaccatctctactaaaaatacaaaattagccaggtgtggtggtgcatgcctgaattcccaactactcgggaggctgaggcaggaaaattgcttgaacccaggaggcggaggttgtggtgagccaagattgcaccattggactacagcctgggcaacaagagcaaaactccatctcaaaataataatgacaataataataatagctgcattggaagtttctgcttgttttctagcagaccctcagcccatatttgttccccttctccccgcttcccatgtctcccattctaacctatggttagaatggctttgcttttgtccttgaacttgttgcctttcttctgttttgaattccctgaacactttctatatggtagccaccaaatgaatttcttctccaatatcttccctgctcctttgagaccttgtcttcacacacactgggagagatgtgcctcagaattcaatagcgtctcagtgtctctgtgaacaccggctccaaccaggtagcagtttattatctttctgacttgtgacctctgtcacctgccaactacttctctctccatgataaaccctggctgatcttgcaaaatctacccttttgtcttttcttttacaccttctttacaagttaatatctctttccaattttatacttcattatttaaccacagcattttgcattcatcactttctccctcataacctcctccaaatatgtactccagactctcagcaagaaaggctgagaaaattatatttaggcaccctctgacagtccttcccagctgaagcctgtgtgataggtatgtcttcacctgtcatagaccaaatccaatacttcatcagcttcaccaactatccacattagtcatctctgggaatttgaagacctgaggactgcctgatgattcctccagtgtaacatttagtcccaaaggcagcatcttgcaatatgtgatcatcactgtcatccttgataccctctcaggaagactgggggctgctccccctaaagccttcattttctttagtgtatatttaatcagttatccaagaattaatgcaacctctttttgagtgtatttaaattcagcctgaggacataaattcaattaattaatacctcacataagaagtatacctaattttatgtgtctgcctctaatttctgaagtctcagaatttaatgaactaatctacatccaatttaaccatgattttacagatttcagctagaattcctgaattagcacttctctttaagagtcctttaaaatttatttttcttattatttcattctaacctcttgattgttgaaaaatcagattcttgactcagttaagactcagctgagaaaattacctcttggttcttaaccagtataatttggatcaagtgagaaatacctcaaagctaattaaagaacatatcataaaatgccttctgtctctagtacatgcaaattataaaaaaaagtttcaaaacaatatacccttacagggtatttgctgtctaatttgtcaaactttccaggttttgccatcctgaaatccccttccctccacaaatgtcttggattttcctgcctctcttgcccaagtctgtcctagtcacagccagactccttgagaaataatctaaacccactttatcaccctcattcactctttaaccctatgcaattcagcctgcccagatgactctattgaaaatatttataccctctttacacaatagtgcatcactctctaattaatacatatttttatttaaaacttacattaaagtgtcaatgcccagtaattccactaacacagagttaacaacttctaatgttttgggttctttccagtcctttctttttgtacatatatgtaaataaataattcctagggtcccatgtagccagtaaccaagagtaatttaaaataatatctggccaggcacagtggctcatgcctgtaatcccagcactttgggaggccaagatgagaggttcacttgagtccaggagtttgagaccagccctggcaacatagcaagaccctggctctacacaaatgtgaaaaaaaattagctgagcatggtggcaagcaccggtagtcccaggcactcaggaggctgaggtgggaagactgctcgagcctgggaggtcagggctgtggtgagccctgttcatgccactgcactccagcctgggcaacagtgtgaaaccctatctcagaaaaaaaaaaaaaaaaaggaagaaaaaagaaagaaggaaagaaagaaagaaaagaaagagaaaagaaaagttaatctttacttgtttttcctgaagacattaaacagtatccaatatatgacccacagcaacactttttaaaatcccctttttccagtttttcccagactccaaccctctcacatctgtcttctctcacctcacctctcaccttccccaagctcttcatgccttgtcaccattgattgttggcttctctcttcctccctgtacattctgcctctagaaaatgatacctgcactgtagatcccctaccccatttggctgggatcacacatggtgttatgtgggataacacacacataacagtgacctccatggcaatactggagttcaaaggactccagtgagaataggcaaatctgaattttccgcagagatcagggaagggaagaggaagaggctatgaatacacttataatagtgcttttaaaaaaaaaatcagttacatatatatttactataattaagctgatggtgtaatgcagtcttagattatttttatttaaatatcatattttgcgcctttttccatgtctttttaaacttcttgagtgtagatatttttgatattatattataatccaataaatgtttataaaaattcctaatattgtgagatatttgaattttttccatttttgctattatgtagtaaatccacgctaaatataatccttttctcctctacatcccagcctggaacaacagacctccttcttttcttcctgaatccccttttttccctgggttccatgacattgcatgattcccaaacctgcaaaataagtattcttcaaggtcctgaactagaatcttgatatagtttgactgtgtccccacccaaatctcatcttgaattcccacgtgttacgggagggacctggtgggaggtagtctatctgcacaagctctttctttgcctgctgccacccaaatgagatgtgactttctcctccttgccttctgctatcattgtgaggctttcctagccacgtggaactgtaagtccaattaaacctttttcctttataaattactccttctcgggaatgtctttatcagcagcataaaaatggactaacacaactctcacctcccccttgtcatcatctcccctctgagagaaggggaagtacttactctctctcttcccctcctcttccttactgtctttcttatcctcctcttttcttctccttctcttcaccccaaccttccccttcccctctgtattgttctgctagagctatcataacaaaaagatactgggtggcttaagcaaaagagatttactttctaacagttctggattccaagattgaggtatcggcagggttgctttcttctgaggcctctctcattgacttgtatcttctccttggctcctcacatcatcttccctctgtgtctatagccaaatttcctcttcttataaggacaacaatcatatcagattagggtccactctagtaacctcatttaagtttaattattcctgtaaagactccatctccaaatatagtcacattctgaaatacagggggttaggagttcaacatatgaatttggaggaggaacacaatctagcccataattctctccttctgcttgtttttccctctaaatatctactaaggattcccactcttttggattctctttgccttagagatgaagggatagttgttgataagaaataatcaagtgggacaaactaacaggaggaactccttgagcaatagaggattttcctagctcactacactgaatcaggtgccaagtccatagaatggtgatgcctgagtatacataagagttaccaggggacttgttgaaaatgtagattcctcagtcttgctccccagagatcccagttcagtaggtctgaggtggtactcaggagtctccccagatgactcccatgcaggttggtgctggactgcactttatgaaattctgctgtagagtgtgctttcaggatctctctggttccttttttccttttcctacctccacctggttcagacctcatttcttcttacctagactattttaatgaccttctacctgattcctatgtcttcccctccctatcccacaccgtgctgccagaatcagcgtgctaaattatcatctcaaaaatctttaaatctaaccatcacccgccccctccactgcccagccaatccagtgcaggcttccagataagagatcaagagctctgattcactatcacagcctttcagactctccactcacttccatgtcccctacctatcagtcacactagaaccatcgtcattttatctacctgggatttcctgttcttccatcacaaatactcacccatctaaatctcactcacgatttatgattcattttaaataatactttcttcattatgccctttcaatatttctcagagtatttaaggttctatgtctctatcatcttcatctgatctgcagtatccagtacatgccttcttccaaatagaatcgcaagtatttgttgaatttactccctgatagttcagatcctatcattctataaataaattagattgcatttctctaaatgcattcagtggtgtgtgccaacattacagtgcacattcccctgctcagcccttttggacagcttgctagctctttttacatttcatctccatcaacttacatttcacttcttgcaaagatattggcgctgtctgcaaaccagatgatttcattgcttatatctcttattttccatatataagaatgttaaataggccctgtgccaggacttattcctgagagaacatttctatttacatttctcttccaaagttatttgcactgatccacttccttgtttttctatcatgaggttttcacatttccaggatcttctgtaatggattacctgagggaagagacaatgtcatgttcacctccagcatctagcataaaatctggcacacagagaggttcaataaatactgtttgaaataattaatataaggggattagacaagaaacattaaccctgaaggacctaagcagggttagtgtcccaggaatcagactggccagggtgattcagcactggaggaacagtaaacaaaggtcaatttggaagaccaggtacaagaccattaaaaggagggaaagcttgggtttaggagccaaggagatcaggaataatttgggaaacaggtcaagacaggctaagatcaaagggctcagggtgtaggttagtaagagggtctgagaaagtgttggcatcagttcttagtagagaaaatttaactgttctaaaccatcagttttttcacttctaaaatagagatgataataataatcatagggagcctcagagagttgttgtgagaattaaatgtcatccaacaaatatttattgagtgactattatgttctatacttcgtgctaggtgctaggtaatggatttaaagctcttagctttacattcaaggacaaggtcaaatgagaatccaagttttcatccttgatggctcatcttcatttgtagcctcatgaaagacttttgttatgttttgttttgttttttgagtacaggctggagtacagtgttgtgatatcagctcactgcaatctcctcctcttgggttcaagcgattctcctgcctcagcctcccaagtagctgggattacaggtgcccaccaccatgcccggctaatttttgtatttttagtagagacatggtttcaccatgttggccaggctggtctcgaactcctcatctcaggtgatctggccgcctcggcctcccaaagtgctgggattacaggcgtgaaccacctcgcttggcctgaaagacttttagaaatctaaattacagtgacttggatcctcattatctatattcttgcctatcacctcaaagaactccaacggatcaaccaaagcctgatttctctccacataattcatgctacctttttttcctcaaacttccaaagtttctgaagaattcaagtgagccactgttttattttaatccttcctatctttcttagtctggactgaaactcaccaccacaaattaccctggatctctctgctaacaactatttatacattgtattagtccattcttgcactgctataaagaaattcctgagactgggtaacttacaaagaaaggaggctcatagttccacagggtgtacaggaagcatagtggcttctgcttctgggaggggcctcaggatgcttccaatcatggtggaaggcaaagggggagcaaggtatctcagatggcaggagcaggagcaagagagagaggagggaggtgctacacgcttttaaagaccagatctcatgagaactcactgtcatgagaacagcaccaagagggtagtgctaagccattcgtgagaaatccacccccattatgcaaccaccccccactctctcttgctcctgctcccatcatatgagatgctcccatcatatctttgccttctgccatgattgaaaactttctgagcctctccagaagcagaagctgctatgtttcctgtgcagcctgcagaactgtgagccaatcaaacctcttttctttataaattactcaatcttaggtctttgtttatagcagtgcaagaacgaactaacaaagaaaattggtaccaaggagtgggacattgctataaagataacctgaaaatgtggaagtgactttggaactggataactggcagaggttggaagagtgtggagggctcagaagacaggaagatgagggttagtttcaaacttcctagagacttgttaaattgttgtgacaaaaatgccaatagtgacatgaacaataaagtccaggctgaggagatctcaaatgaaaatgaggaacttactgggaactagatcaaaggtcaaacttgttatgccttagcaaagaacttgactgcattgtgctcctgccctagggatctgtggaactctgaacttgagaatgatgatttaaggtgtctggtacaagaaatttctaagcagcaaagcattcaacatgtgaccaggctgcttctaaccgcctatgcccacatgcatgagcaaataaatgacctgaagttggaacttaaatttaaaaataagtttagatttaaacctatatttaaattttaacttgtatttaaagggaagtagagtgtaaaagttaggaaattttgcagcctggccatgtggtagaaaagaaaagcccattttcaggagaagaattcaaactggctgcagaaatttgcataaataaaaaggagccaaatgctgatagccaagacaatgtgggaaaggcctcaaaggcatttcacagacctttggggcagttcatcccatcacaggcccagaggcctaggagggaagaatgattttgtgggccaggcccagggccttgctaccctgcacagcctcaggacactgttttctgcatcccagctgctccagctcctcctgtggctcaaagggatccaagcaccgcttcaaagggtgcaagccataagccttggtagcttccatgtggtgttaagactgcaggtgcacaggatacaagagttaaggcctgggagcccccacctagattttagaggatgtatagaaaacttaaatgttcaggcagaagccagctgcaggggcggagtgctcacagagaacctctactagggcagtatggaggggaaatgtggggttggagctcccacacagagtccccgctggggcattgcctagtggagctatgagaagagggctaccattctctagactccagaaaggtagatccatccacagattgcaccgtgcacctgaaaaagccacaggcactcaatggcagcccatgagagcagccgcaggtgctgaatcctgcaaagccacctgagtggggctgaccaagaccttggtagcccacccctcacaccagtgtaccctggatgtgggacattaggtcaaaggagatttttttggagctttaaaatttaatgacttccctgctgtgtttcagacatgcacggggcctatagaccctttgttctggccaatttctcccttttgaaatggaagtatttacctaatgtctatacccccattgtatcttggaagtaactaacttattttatattttacaggctcataggtggaagggacttaacttgtctcagatgagactttggacatttgagttaatactagaatgagttaagacttttgggcactgctgggaaggcatggttatattttgacatgtgagaaggacaggagatttggaaggagccaagggcagaataatatggtttggatctgtgtccctacccaaatttcatatcaaattataatccctaatgttggaggtggggcctggcaggaggtgattggatcttggggacagtttctcatgaatggtttagcaccatccctgttggtactgtcctcatgatagtgagtgagttctcatgagatctggtcattgaaaagtgtgtggcacctcccacctctctctctctctttctttctctctctctttctctctctctctctctctcactcctgttcctgcaatgtaagccatgccttctcctgcttcaccttctgtcatgattgtacatttcttgacgcctcctcagaaactgagcagatgccagcatcatgcttcctgtacagtctgaagaactgtgagccagttaaacctcttttctttataaattacccagtatcaggtaattctttatagcaatgtgagaacagactaatatgtacactatgatgactatttcaccgagaaattacttcaaaattcttggataggtggtactcacttctaatgatatgtctgtctatcctcagccagtgttgttgagagtactcaagtcatccaatctagttgagtccatgggaaatttggagggaatctcagtaaattaaagaatttcagttttgaaagggatacttggatcatctagttcaactcccagtattctaactggaaatatttaggccaattatctaatattttcttttcatctctgagcatgaattttgaatcttgataatcaaatgttgataccaattctgtcttcctcctttggtaatcttaagtaatttttaattctaactttggacacccttaaagatgctttcaaattatttttgaccacctcatttctagcaagtaaaagtttatcttccaatagaactcatagaatacagttgtaaaatatgtgaagcaataatacaactaaaaggataaatagacaaatccacaattttagttggagacttcaacacccctctctcaacagttgatagaacaactgaacagaaagtcagaaaagatacagaagtgatctacagaaggagcaggattggaaaaaaagttttttaaaaaagaaaggatatggaagtgacgattttacacgtgtgaagaactgacattttacctttggacttttagaaatatttgattttctagacatcgcctgaatgttattttgacttccaaaagatctcacggtccaggcacagtggctcatgcctgtaatcccagcactttgggagggcgaggcaagtggatcacctgaggtcagaagttcgagaccagcctggccaacatggtgaaacctcatctctactaaaaatacaaaaactacccgggcatgggggcatgcacctgcagtcccagctactcaggaggctgaggcagtagaatcgcttgaacccaggaggtggaggttgcagtgagccaatatcgcgccactgcactccagcctgggtaacagagcgcgactccaacccccccccaaaaaaaagatctcaaaaatttactttattcttgttcttagcaatgttgttagtgccttagatttattcatctattcagtcattcaacaaatattaatgcctactatagtcaagccattgcattgggcattacaattgattttattatttttgaaatgtttaataagtaaattctatagagaagaagctatttaacaatagcatatagtataaataaaataaactatttttaaaagttgtaggactatattagtctgatcaagctgccataacaaaataccacagactgggtagtttaaacaacagaaatgtatcttcttacagttctgaaaactgagagtccaagtccgaggtgttagcagggttgatgtcttgtgaggctcctctttggtttaaagacagtccttcttactgtatcctcacatagcctatcctctgagtgcaagcagagagagagatctcttcttcttataaggccatcaatcctatcagattagggccccacatttatgatctcttttaactttaaaacccatctctaaacatagtcacattgaaggttagggcttcaacacacaaatttggaagaggacacaatttagtgcatatcaaggactaaatcagtcagcaagcatcctttacttctttcagagtttctcctctggagagaattatggaattatagttctcaccagcacctgttgttatatgtaagaaaaaaacaaaatttgggagagaaaatggctttcctgaagatcacagagaaaacgggaacagagacagtagcaaaaaccaagtcttcagtgcactctccttttggtctggccttggctcagagagttactgctccacagcatacaataaagctgcagctggctttagtagatgtttgtaccatgcactccatggactcttcctattaatcctctgctcaaatctccctcctcacacttatcaaaatatcacatcagcgctcctgaccaaaatctctgctttctcttgtgagtactgagtttatcagaaccaccttggggattttcttatccttcatgatacaggcccagtatgatctgaatatagattctgtataatcttctgccatcagggccaacagataaatgactcctctccctatactatctctgtcatttggtggggatcattttttgcattagagaaggttcgtcaaggtcgttgcttcttccggattgtgggccctattgaaggtatgttctcttcactatgaaatgtagttgcattttcttccaccacctcaggctctctgttctcatgacttgagggctaatgtgctacagaagaccttgaaaaatgaccagctgacctggtcaacccatcagtctctctggctcaaccttttccactcaaagaagacaaaccccttctctgagggccaggactttattaccactcacagcaaggtttttgtttgtttgtttgttttgttgttgttgtttttgttgttttttgttttttagacagagtctcactctgtcacccaagctggagtgcaatggtgaggtcttggctcactgcaacctccacctcccaggttcagaagattcttctgcctcagcttcctgagtagctgggactacaggtgcatgccaccacacccagctaatttttgtatttttagtagagatggggtttcactatgttggccaggcttgtctcgaactcctgacctcatgatccacccaccttggcctccaaaggtgctggaattacaggcgtgagccaccgcccctggccttaccacaggtattttaacatcaggcagatgtacaaagatattgtcccagtacaacaaaccaggcagaaaatcccctgctactgggatttctccctctctctcttctttctttccccttgctctttcttcttttttcttgatcacttttttccttagatttgtaaatccttagacttgtactaattaatcactcctgctatttagtaactggcattgtcactgccacgtatggcccaagatgccagaatttagttgattgatcagttggtgggttggttggtttgttgactggatggacttttctgagtatgatgcttggttcatcaatacaagaatcacagaacctctggattgggttcttaaaccctagctgcacattagaagaacttttataaaataccgatgtctgggccctaccttcacagattctgatttaatttggtcttggtctcaaaggctctccatgtgattctcatgagtggccaggattgagaatctctggatagagctaaaagattacgcaggcaaccattgatctgatacttaaatcccttctactgggaaatccagaaagatgactctttctggattttctttctgaaactaagattctaggtagtattgtcttcctaacaatcttcctgggtataaatactctgctctgttactatagaaggaagcagcaggtaatgtttagtggtagaccagaacttcccctaaaaaatccagcagtgcttagctgtggcacttcctgatgttagggaaatatcctcccaggtcagtggttctcaactgggagaaaatttcccccaagtgatgtttggcaatttctggagacatttttggttgttacagcttggtggaatgtcactggaacctggtggaggcaggccatggatgatgctaagcatcccacaatgcacagaacacctccccacaacaaagaattatttcgtgtaaactgtcaatagtgccaagattgagaaaccatttcctagatccttgccctcaggtccccctattatacccctaagagataccatccttaatgaaattagtcctaaagcatttccttctttctgaagcatgatttcagcactgtttcccaaatcaacattttacatcctttttaagtatcttttaatgtgaccatcctgctttgcttttaagaaatgaaggctgctgcctgactgtgtgtgtcagagaggcagaataatcccaaggctgccttttccacttgctgcttcctttcccatctggctgcctccctgaaatacagaatgagctgagccctatgacctgatggaggccctgccaagcccaccttgaccaggtgctgcagccagtggagctagtcttcagggtgcgggtcgctccatgaaacgtggcagctgggcttatcagctgccagcctggataagtcaggcctgctgccaagttgattaataagcgctgggctgacacttcaagaagggcctaaacctgctgattttcctcccctcttccttagatcatttcattattaaattaaagattgttgtgatttaaactgaactgtcaggcagcctagggacaaacgtggggtttggtgaagcagctgaacctggtactgcatttaccaaatcagatctcagctgggtgctctttctttctcttaaaaaaacaatttagaactctaagggcttgaagtagaagtagaaccttcccctgcagtgtcaggagcccacacagggaggctggcatgccaggaaagggacctgattataaatagcatgaaaagcagcatcagtcaaaactcactgatgtgcctgggcaaaatgttaaaagaaacaaatagcttctaaaaaaggaagcaatggttttatttttataatctaaagtgctaaggaacaaaagcagtttatattcacatagttttaaacacacaaacatgtgtgtgcacgtgcacaaataacacacactaacagagtccctttaaggaaatgatggataatcattttaatataacaaaatcacaagtagagcctcacagagggggtagctgtcctttcttttctatgtaattgatgctatttatttagaaggtctatggtttacccttgtgaagtaatttttctgtatgtgtattttttttccagcttagatggaaaccatttgagattccaaaagcatctcagaagaaagtagactttgtgagtgtaagtcagtcccatccacaccctccctactgctctcctctcttctgtggtgagtgagccaaccatttgcagcctgaatgccaagcagaagcagccctatcaggaggcagcagagacaaaaccacctgcgtatgctttgggggctggcggagggatgtcttacttacagaaaccatatggcccctgacaccagagggtattcatgaactatttatatctcagaaaggccaatgacaattgaacattttcttacttaagttcctttcttttggctagaacgggggcttttaacctttttctcactttgatgtctgatgtctgatgatgtctttgtttataaatatataaaataaattatataaaattacaaagaagctaatgatattgaaatataacgataaaaatactattaaaaacaaatttgatttggtttatagtcattcatgtgctttcttgttaatgtgctaaatcataatatctatggaaaacatctaataattctggtatgagcataaatatactttgaggtatctataacaactataatgtgatatccatgatttttatcattgataaagttacaggcacctctaatactgctgtggttttttgcctacattcatattagttgaaagaaatgataaatttcactcagagattagcaaaagtaaatataaaatatttcccatccaagttcataaatctccctgaagtagatgcttgggctagaatggcgtcaattcaacatggcaactctagttagtacaatgctgattggaagctctgtttggtagttataggtcccaggagtactggaataactgcacagagcaaggagtatctgggggagaggagaaaggagctctaaggaagtggggctcaaagagaccagtggagggttctgcagaccagcctcagctcatggcttacgtagggacactccaagtgccgagccataggataaattgttggaaacatcttgaagttctcatctttattaagtgctccaaactctttgtagactcacttaaatataccctaaacttacaaattgagttaaaatacaaaatgatatccccatctcctttcttgtgtgaattgtagatatctggaggcgcagagctctctccttttggctctccatctgcaggtttggggctgagggctattttgagaagacccatgtgttaaggtttcttgcactatggatcatctggtcacacagcagagagaattacagtccatctgaatacagtcctctgccctgttccagagagattaggctgaccctatccataagcagagggctgcccatagtggagtgtacttgagaggcattaactggtccctgatgctgcaaccttcctccccaagcctcctagatgcctgatggtacctccaacagaatctcttcttccagttgatgtcaagcatcaaattgataaaataccaagtaatgaactgatactctgtaagttcttctgatatagccactaagacaacccagatttaggccatggctggagactagggtaaaccacaaactaccaaacatgagtcagtaaattcaggctccttagaggctgcctggattccaaacgtcccaccggtcccaaagggaagaccctagtagaaatgtgcctcatgaccctcagggaccagtggaagggctgcctcttgggcaccgttcacattaacctttccctcttctgtgggtctctcccagggcctgcataccttgtgtggagctggagacataaagtctaacaatgggcttgctatccacattttcctctgcaatacctccatggagaacaggtaagtggctcagttctagggaaggacatgcccatcttctaagggattttggccagaagtcaaactccaggtttcactcttgtgaagtcacatatgcacatacatagttgtttttgttattggttttctcctcaaggcaatattcatatatatttattgacaatgataatgaatgagacaaaaggcatttatcttgactgaacatcagtgatataaacaagcacatcacataacaatgtaaacagaaaagggaggatggagccctggaatgcaggagtagatcgaaaggcattttgactttaagtctgagtccaaatatgcttttgttgttgtttgatatttcaaggatttttctgagccaaatatgagtgaccaatggcctgcgacacagccatcaggagatcctgagaacatgtgcccaaggtgattgggctacagcttggttttatacattttagggaggcataagacatcagtcaacacatataaggtgtacattagatccaaactgtggtttttatctcagtagaaaagtaacagcagatttaaagcaggcagaaaagaaaacagagaaatagagaacttagaaactctgtagttgcaggttgacctttgggctctgaatgatacaattttcccattggtttaaaatgtgcacaacagactgtaatatgtaaccagctggagtactagaaactctggcatacccttgaacttttccattttacacaaacacttgcaagtagaggcacctttctccttgtctttcctcattcttagattatttgtttcccacgttttttttcttaaaaggaggaactgagctgtgacctaggggttttgtgggtggtggattggtgtactgaatgtaggcaggactccacagtgtttcaccaccgagtcgtttccaccctcttacctgtctcagtttctctctccagagatctagcacctctgagaggcctcaaaatgccaagtgatcagctcttatatgtatttccgggacaaaactatttttgggggggttccctgtagcgccactgcacatcacaggggatgaatccctcagacactgcaactcagcccctagtcacccagggtgcctttcagttgggaagaacaaaatgccctttctcttcagagctgaggagctcagtctctcatttatgcacaaaaatgacagtcacacgaatgcgcaggcaagccaactgagctaaatttggggagaaaaaacaatggagtagaccatttagaatacacctccaaactggaaaccaaacagggtacccaaaagggagtcattcttgttgtctttagaaaaagacaacggaggccgggcacagtggatcacgcctgtaatcccagtactttgagaggccgaggtgggcggatcacgaggtcaggagctcgagaccagcctagccaacatagtgaaaccccatctctactaaaaaatacaaaaaattagccgggcgtggtggtgggcgcctgtaatcccagctactcaggaggctgaaaaaggagaattgcttgaacccgggaggcggaggttgcagtgaaccgagatcatgccattgcactccagcccggacaaccgtgtgagactccatctcaaaaaaaaaaaaaaaaaaaaagaaaaagaagaaaaagacaatggagaaatcctttagaatggacctgtgaactagaattaggaacctaaacaagagcttcctaggagggaaaaatcaagaactgtcaaccaaacagggctcaggaggacttaacagttccatcagaggagaagcccaaagttgaaggcgctttcaataggtccctgctgataccttagctctgagttcaggcaactccttcagggttctgagtcttctctgaggcccaatgtgtccaggtgccaaattattgttgacaaaaatagtcaaactattaatatgtaaaatatttgaattgatgtattctgagccaaatatgagtgaccagtgacccatgacccagccctcaggagatcctgagaacatgtgcctttgaatatccttaatttctaaggttccccagggctgttcttgagtcccaggtcacagtgtgtgagtttccattaggaccacccattagtagcaggctacccgactttggcttcagctaacagctctgtgtaagcttaaaattcttaagtagaggagcttatatactggctttgcaaaacaaagtatgcaaatggcattcctgccttattatacactacctctggaactggaccatttgtgtccaaagcccaactctacatttcctggctgagcgaccttgtgagccatgaatcagggacaagatcacagccctatgacaaggctctggaggcctctctttgggtcaaatctcatatcaggccacctcccctctctccacttgagccgcattggccttcattcacttctttcaagctgccgcgtgccctccttctaagcacttgcacttgctgttccttctgcctggaacattctttcctttctccaaaccctcacctagataacaccttcagatatccggtcaaatgtgtcccttctttgaagaagcctttgctgattcttcaaactaaccaagtcgctattctttcattccctcaaacttgattttcacagggtcattacagtctgcaaagatattgttctgtaattatttgattgctctctgactccccactagactctaagttccacaagggcagagcctgggtcattttgctccccattttatacccagctctgagcttgctacataggcactaaacaatgatttgtgttatgacgtaatttgtctagacaatgttaaaactgaaaatcacaagaattactctatatgtttcagatgcttttacaattcagatggggacttcttgattggtgagttctgaagacttcagaccccctcactgttaattgacccctaaccgcaagctgctttctaattttatacacattattttccttcattctccaatctgtcttatttcatttagtgcaatccagagactgaggtctagaggccacaggtggtctggaaaagatttctagtgtacctcaaagcccctactctatttccttgtctctctgtctttgcccatctcttctggacctttctgatgtgggagacctgggcagctgaaaagaaatgaagactaatactaatgggattaacttattacggtaactgtatttgccttgaaactctctcagtaaaagcccatttatcattagtaactgcaatttaaattcaaattttcatgagaccatctaaaatgtaaagtctatcagagattgttctggtctgcctattatacttgatggttttttagtatcaatattttggaatcaacattttcgtgtatatgtcacacaagcaaatgtcagcctttcactggaactatcagaaatgggtgattttccatcctatttctgctacccctttttgaccatgtcacaaaattgtgcatatacaagttccttgcctggtgaccaaaaaagcagagtcattgttttattcacattcttctagataggaaaatagctaatctaagttgtcagaatttatctttttccccaagagactcaataaagctctttgcatttggaatggaaaagcaaatgcagccttaagcctttcctgttcatgaaatggttatcacaccaaaagaattgctcaccactgccctgtctttttttgtcagttccgcagaaagggaaccttctcatttacaccgagtttggcaagatgcttgtacagcccaatgagatctgcgtcattcaggttggtgatgtgtccccttctcttccctgcctctcactaatttgggagcagtcagatgtttcagctgctgctatttccaactctaaaatttctctgtcatgtctgggcaacgaggagggaatctgagttatgcagaaggttccatgtgctgaagagtaagcaagcttgggtgcctgctttcttttaatatagcacataattctaaaggaaagaccacttgtcattgcactttcctaaatatttacatatactctggataaggccctgttcccactaatggcagtagaggcagtgaaggtggactttttttttttttagtgtggctaaatcaggcttaccattatctctggacccaatgagagggtagactagaattggcttgggtcacatgtgtgattaggaattcagtttttctttttaaactgaattttaaaaatttctttttaaaaaaattcagtttttcatgtttgctctggtcacctcccaagcagctcaacaaacaagagctttacttttgcatgtgggatgggctatggctctgggcagcttctttataactacagctgtgatttcagagggcacaccagtgtctgctttccattccagagaggaatgcggttcagcatagatgtctttgaggagaccaggggctacatcttggaggtctatggtgtccactttgagttacctgaccttggaccaattggtaaatcttcattacaagcctctaagcctcgcttgagatgtaggactcagataattgcatgaaagttaaacatccttctcccttcgctgtctcactcaaacttccacttttctctctagacaaattcttctctagaccaagtgtcttcccagaaaatatatgcaaaacagaaagcaacccaaaccaatccattataaatctctctagaatagtatacagacattggagataaagacggcatgtaatagatttctggttgcatagtgtgtacaggaaagaatatagaagtttgggttactgtgggcttgggtcaccagaaacagctccacagaagagatgagaatttgactaattctttatgaaaagttgaggagagtaaagaggaaagggaacagctttgcaaaagcatataagtgagaataagctttgtgattaggaggaagatatttttgttaagtcagtgagatttataatggattggtttggattgctttttgttttgcatattgtataaaatgggaaggccataaaaatgccctgggctgtattcctatggaaaggagggatggactgggtgacacatagtctatgaacctctgtgtacaccccaccaaatccacacacttagcagtcaaaaaaacacatcactcagtgctatgagagatctagaaaccacaccccaggaggcagattaaaacattccaaagtgaaccaaggtctccacagcccccattcttctggcaagctggaggaagtgaaaatgttaggaggggttgttctcaaactgtctcttggattgaaagaaatggctgggaaaattggcccttggtttactctttggtcacatctcccaattcttcccttccttgtcaacagctttttagagcaaacagggacaggccagtgtgtgccttctggtcagctcctctgaggaatccaaatatgcagaggaaggtgggaggcagcaagaggcagctggagccgtggtgggccgtctgtcatcctgttcacctcccactcttcccactctgctctggcttcctgctgctctatagtcagcatagcctccaggttccgtggaacatgtaccctctggaaaatatctataatttgctaaccagccggggacttatttttttaagtccaggagctggaaatgataaaacactcctcagctcgctcctctcagagttaaactgtttttgcacttaagtttttcatgtttggtcttttgatttatttcctttctctggaggaaacactcactcctaagcaaaggtaagcaggcaggtcctaaatacttcttcctgagtggcagacagggtttttcaggctggagaaccgttttcagactggaatctgagttctgtctagggagcagaggcatgccttaggcaacagcgtgtaaccctttctatctgagatcaaggactgtcaatgacttctagaatattcaagggttccttcaaaagaaaaagttctggagttctatcagatcttcccttttcctcttttcagttctctttctctcttcccttcccctcacctgtagtgataagataatgcatataagattgttttgttaaccatagtcactccacaaccttagaaagtaatgctggtttttgtgaatttttttctgaccagattccttgggtcttcctaaaaggtaccagactggaaatgcagtgaatctttgagcaatgaaagcaatttgtggagtagctcttgacatgaaagaaagcctttctcttcatgcaaccatgggcatctttcctatgttttggaagtttctaaaagacttttgggttactgttttctaggggccaatggcttggccaatcctcgtgatttcttgatacccattgcctggtatgaggatcgccaagtaccaggtggttacacggtcattaataaataccagggcaagctgtttgctgccaaacaggtaaagtaaaagggttggcaggcaagggaggaaatgaagagtgattgagcacttactgattgccaaggcgagtgttacaaactttacatatatcctttcgttgttatcataccactacggcactacaaataaagcaaatagttctagtagtcaattatactttcatagtcatggaaaaggccagtaatgataaataatttaccaatttcacagtaagtggcagaaccagaatttgaacccatatctgtctgactccaaaggttgtgccctttctactcaccaagcaatgaaaatattagcaatatgtaggtttctataagtggtatggaaaacataatatatgggcagcataatatgttctgaaaagtaaatgagttaacagatcagccaagatttatagtctccaataccaccctatttcaaatacaagcaattctacaaaacaagtagaattcagttaattagcttggcttggtttgtaccaccaggctggcaattcaggacacaagcaaaggcacagatattaataaataataataacaacaatgtaatatggactctataacataatatattactaaatgtactgaatatatattagaataaaataatcatataataagaagaacccaaagatctcttctgtttagcattatttgtttgcttcattttgtctatttgacttattccttatattttccaaggtatgttattcttcttaggcagcatctagagataatgccaaccagccgaggccaaccagtttggcacttaaaattaacccctgaagcagacatattgttattctcttattctctgggtcaaggtctctcaaaattcgggggctatttgcatcagaaatcctcaaggaggcttgtttaaaattcagatcctaggctgggcatggtggctcatgcctgtaatcccagcagtttgggaggccaaggcaggcggatcacctgaggtcaggaattcaacaccagcctggccaacatggcaaaaccccgtctctacccaaaatacaaaaattagccagatgtggtggtgcacacctgtaatcctagctacttgggaggctgaggcaggagaatcgcttgaacccaggaggtggaggttgcagcgagccaagatcatgccattgcactccagcccgggcgacagagcaagactccctctcaaaaaaaatgcagatccttagatactactctagccttgcaaaaaatgataagctttggagatgggacatggaaacctacattcattttaagcatgttccccagatcattgtttacatacaattgttaaagaaccacaattgtagaagcagccagtagctcctccgaaaggtttgcactttccaagtggaccctgtgctggttattttctgtgtgagtccccactgatccattctccctctttgccatgatctgtgccctggaaggttgactgtatcacccgggctccctagccagctggtttctgttgggttcaacccacaggaaactacaaggcaggaggaaagacaaattgggatatttcttcccctgcttcctcgctgtttaggactgtgtttctgacagtagctgcatcccccatatgacctcagttcctgttgggtagccctagtggtgggctggagctgattcatagtgacttgcaaaagctgatatgcacgcttctgtccaactgtgtatttgttgatgtcatactggtagctagaaaatcatcatggtgagactgtatacaccttagaaatcagtaaacactatatgtcaatgctttatgtatttttttcagagtgctagttgtgaaatatttaccagcacaccactgggtaacacccttctttataattctagctcttgctaaagtcctataacaatatttccctcctcattccacatgcccaggaatagcagtgtcttcccgctattgctaggctcagatacctcaacatttctagtcattccagttaaccctaaccacgcctctatgagtagcgccttcattaaaatctttagcactttcggacccatagatacagaagggaccaccttcctatagcaggacactgatcctcttctaccccaggacaggaccaggaagtattatgttaggattgctctgaaatctcaagtccttggagttggaacttttagaggccttctcccctctcctggactcaccaacccaggcactgtgtctattgcaagctcctctaggctgaaattacctggagaagcatcacagcaggtactctctgttccaggaaacagaaggtagcccagattgtttgagaactgctgacatccacagatcctcacagttaggttaaaaattgttgaaaaggcactacttggagaatgtgctgtgtttctgctgcatgtgtgatcagaaggcagctgcagcttatgaaccagaaaaatagggttagtggctaagtagagggtgtgtggagcaaccacaaaatgattcagggttatacttctcccaaaggacggtaaaattaaatcgagaacaaaatcaaatcaaaagaagagagaggtatactcagtacatattgtgggatcacagctacaaaagcattagatggtaaaattatcctttcctgctttttgtgtttaggatgtctccccgttcaatgttgtggcctggcacgggaattatacaccctacaagtacaacctgaagaatttcatggttatcaactcagtggcctttgaccatgcagtaagtctgaaccctgtaggggccttgggatgaggcaacgcttgggtgggaggggtccacagtagacccctgacatttacagatctaacatttccaatgtcaccattggaagccctagatatagtcatttgtcctttggtgagggagtaaataacacaactagtagggaagcaaagccagatactcaacattcccctgtgaacatagcttcattctctacagagcattggtgatactctgacttgtatttgccaaactaagtggataaacacttagtttctttgtggaaaatttatcccccaaaacaaccaagtgttaatgtcggtggtagaatgaggagaaaggaactttatgaatttggagaagtccctgaccccacaactctcaagagcctcctctatgatctctgacttctcaccccagtgccttcattcctggctgtatttggcagtgacagagtgaacagcccacttctaaagttactcataactttcagtgcttgagtttaaaccaaagaaattctagagcatgaacttggtcatatttttcactcagttcgcaggccacaaatggtctctggtctacagtgcaggctcccaagaccctacattcttaataaagtggtggttctgagaccccggggggaagttcattttgcagctcacttcataagagatgaacctaacccacaagctggaaggataattagagcagaagtcagagactcagaggcaaaaggattattgtgagccagttcagtttatctctggggggacaaacctacctctccaaacagcagcaactcttaataaaagcaaaggggaaaagaaaagtgagacatcagaccccaaacaaacagcacgaaaaaggatcctgagacactgataaagctttatttgtgattcactacctttgctttaatagtttcagatcatgtcccatgacagttgaagaaatgtcaattctcacagcaataagggttgggtttatttttatttgaatttacacagatgcgatcttctctgtattgctgcaatagttatttttccaaaattcagttctgatcatgccaccactgtcttcattagaaagcctttgcaggcttcccatggcttaggattaagtctgcactctgaagcatggtgtttgatgctcttcaccatctgtccctggactcattttccagtatcacctcttgcccctctcccttctgtcaatgcactggggttttagccttctctcctcttaacaaaatctctgtgcactttgatgtgttttcagtgattaaaatgtcatttcccttccttcccacttccttagtcctccctccctccctccctccctttttcccccatccccgccacgtccttcctttctttttttttttttaacttttattttaggttcaagggtacatatgctccttccttccttccttctttccttccttccttcctttctctctctctttttctttctttctgttcattcttgaagacctacctcaaatgtcacctcctctttgaagccttccttgaccctttcaggtagaattagctgcccaacccccaccccacaattaatgctaaagaagcagggaatcgatccccatgatctttgaatctccagactcttacatggcatctgaaagggaacatgattgttgatttcaattaaattgaatctcaaccttctcactaaagaattctgaagagttttaaaaagtataatttcgtccctcaacctatcctatctctacactaccactatgaagactacggatgtaaatgctgtgttttagacctgaaagtcaaacaaaggtaggaaagcaatgaaccacttctcagacttttctgccaatggatacaatctggaatctccgtattctcccaaagaggagcacatctacaccaaaacttggattttgctttatttctatttctactttgctctgagcatcccttctgctgcacatctcagctctagtcaacttgatctgaggttgagaagcaggcaccgttggttctcagacccacggggtaataagttgcatgtaatgtgggctcagcagggtgaaaaagcagttcagaatccttttagctggtgttaattcattttgcctcaagcacagcaagaggaaaaagtcatatgagtgattattgcaccttgatgacaagcccagacttctgttgtttgatcagaaattaggctgtccgtttgcagcaacatggatgcagctggaagccataatcctaagcaaattaatgcaggaatagaaaaccaacttctgcatcttttcacttataagtgggagctaaacattgagcacccatggacataaacatgagaaaaatagacactggagactactagaagggggagggtgaaaaaactacctattggatactatgctcgctacctgggtgatgggatcctgtattagtccattttcatactgctgtgaagaaatacccgagactgggtactttataaagaaaaaggggtttaacatatccacagttccacatggctggggaggcctcacaatcatggtggaaggcgaaggaggagcaaaagcatgtcttacatggaggcaatcaagagagcatgtgttggggaactgccctttataaaaccatcagatcttgtgagacttattcactatcatgagaacagcatgggaaaaacctgcccccatgattcagttacctcccaccgggtccttctcacaacatgtggggattatggaagctacaattcaggatgagatttgggtggggacacaaccaaaccatatcagatccctaccccaaacctcagtatcacacaatatacccatgtaacaaaactgcatatgtatccctctatctaaattaaaagttgaataaaaataaataaaaaaattagaatgtcacttgcaaacaccttcatgtatgcatgaaatgtgtgtcattgtccagtcacttcccttgcatcatgcgttcagtctctccttgtgtgttcacaggacccatccattttcacagtattgactgctaagtctgtccgccctggagtggccattgctgattttgtcatcttcccacctcgatggggggttgctgataagaccttcaggcctccttattaccatagtaagtctctcttttaccaagccacatttgcaagccaaagagacaacaaagcagtgagcgctacacattgggaataatgcctgggttatttctggacacccaccatggcatgaattcaggatcctgctgcacaaggcctagtgctgatccccaagctttaatctctttaagggatggtagttgtgttagtccattcttcgttgctataaaggaatacctgaggctacttaatttataatgaaaagaggttcatttggctcgtggttatgcaggctgtacaagcagcatggtgctggcatctgtttctaatgaagcctcaggaaatacaatcatggtggcaggcaagagggaagctggcatatcacatgatgagagcaagcaagagaaaggaggaagtcccagcttcttttgaacagccaaaccccatgtgaactcatagagtgagaactcactcataaccgtcatgatggcaccaagccatttatgagggatctgcctccattacccaaacacctcaaaccaggccccacctccaacactggggatcacatttcaacatgagagttggagggaacatacatccaaactacatcaacagtgatgcattgattctgagcctagttcccagtttctctgtccctgtaagaggcagaaaggctggtaaagtttagaagccttgttagaaaggcttctaaacaagtttcctcacattttagatgtttccttttggggaatactggggaggttgttagttagtctgttgttttgggaaagttcatcacctaagtctggttcagagaaccagagaaataagaagagagagacagagagagacagagagagagacagagagacagaaatgtgccttctccaattattttggcagggcaaagcagactgcagcctgcattaaggaatgaactctattctggaaagagtttctgcagaacatttgttgcctagtacaagacctaacaaatctactatttttattttattaatattattattcttagcacctaataattattgtccaatttctatggctctgttacaagttttttaaaaaactaactcatgaagtgtttataatacttgtaagagacaggtagtattattgtcccccccgctttttttttttttttttcagaaaattaaactgacacaagagggattaagtaactctctcaaggactcacagcaagttaagtgtagagtcaggatttaattgcaggctgtctgataccagagcaaacactcatgaccactaactggtatggctagcatagtgcctgatatatagcatgcttttaataaatatttatttaataagtgaatgcatcaacaagaataaataaagtacttcacggctgtacttaatgaggttgacatttttaattgtgcaatagctagctgaaaatccaatcaaaggtcaatgtgcaattctacttcctggagtgtgcatttttttgtgcatagagttctggaaagactctaagaggcattccacctggaacattctagaaaacaaattcctttctttagtaaactccagggccttctgtttataataggtccctctctatatataccagttcccaggtgtcagggctcaacagaacacaacagtgcactgaatggccaatttagctattttatagcatcaggaatgaaggcccttaggatggacgtaggccactccatggtcaaatgccagcatcccccttttcagatggcaccatcatggtagagaaaagaaaacaatcagttaccatggcaaagacagcagctattttgtgaatagcatcataagtcgtttctaaaaactgtgaagcctactaaagactctaacttttctcctcctggaagttagtgacctagaggacctgttgtcaaggagagaaaattgccctggcttatagtctgtacttcgcatgttactccttaataattcaccatttcactcttgttcttgtattgaggttactctgtgtgcctgtagtggttcttacattttaccatgtgtcacagtcagctggaaggtttattaaaacacagattactgggctccatcctcagaatttctgcttcagtaggtctgggataggacctaagaatttgcatttttaacaagttcccacaagtgatgctgaatctgccttttttttttttttgagacagggtctcactctgtcacccaggctggagtgcaggtggcacaatctcagctcactgcaacctccaccccccaggctcaagtgatcctccccgctcagtctcctgagtagcttggaccacaggtgtgcaccaccacacctggctttttttttttttttttgtattgttagtacagacggggtcttgccatgttgcccaggctggtcttgaactcctaaactcaagcaatccacctgccttgacttcccaaagtgctgggattacaggcatgagccaccatggctggccagaatctacatttttcactggcaagtcaggggattctgatgaaggaggtttacagactgcttgttgagaaatactggcctagggtgtgtccccatccctaggtggaggaataatagagtcatctgatttagacaagtttgctactgtgctatagggtctcaacccattccttaatttttatttgtagttcagacttgctgacacaaataatcttgagagatgcctcctatagttttttaatgactctcaaagtaaatttggccccagggtagatcttataaaggtatgggtaccctgagttcgttgggaaaaaaccacagaaccccaggttagaaatgagttttccagagatattaaaaatattgccttggcaatactcaaaatctttgctgctttgatgtgactttattataagagaaaatggagaattatttctatagaaatattgcctccagtcatcttaatgtgccttagtcaactagattcagctttttttttttttttttttttttgagacggaatctcactctgtctcccaggctggagtgcagtggcgccatcttggctcactgcaagctctgcctcccgggttcatgctgttctcctgcctcagcctcctgagtagctgggactacaggcgcccgctaccacgcccggctaattttttgtatttttagtagagacgaggtttcaccatgttggccaggatggtctcgatctcttgacctcgtgatccacccgcctcggcctcccaaagtgctgggattacaggcgtgagccactgagcccggcctagattcagctttaatcagaaaggcaaggtctatcctcccactgtcctttgaaatatagaaaatgatatagaaatgtcatcaccaagctcactgctatctaaattcatattcagatcaaagctgaattctgttttgctctcttcttaaaattaagccatgaaggtgaccctgaggacacatactagagcaaggagcttgacaccaaatttaagtcatgagctgaactgtttttaaaacatagacaatttatgcttacatttgcttctttttctgtatttccacttcatagagaaacaagtagaactatgatctgggtctcacctcttcagcaggagctcacacactctcactcactttgtaggggcctgcagtagctttctgtttctgagcagggtgggtgtggctgcttagtcaattataaaagcatttggcacttggttatacttcacatgtaagcaagaagggcaggcatgtatcatgtccagtgtttgattttgtaacggttgccactgccacatctctctattctgtccttggtttgccctctcagtactctcacaggacagactatgagtagctttaaaggctatgttgttgttgttgttgttaattatttcttttttaagtagctttaaaagctatttcttattcatctctgtctcatgttagccagcacatatctaattatatgtgctggctaactggatgggcagatgggtgaagtgggaaaaagacagatgaatgaatgggtaagtagatgtgtggtttgagatgcaaaggcacttaaatttgcccaggtgttatatttctttaattcctgctctatggtattgctactctaataaagagctttatttcaatagaagcataagattggaagagtggaagcatggtgatttttgttaaattttgtgtgactctagaaagcacaactaggaccaatgaatttaactcatataaaagcaaatttccatttaatataagaactttcttacacacagagctcttcaataatatgatatgctttgtagagtggagagcttccattcacatccaggcagagcccgggaggtaatcagtcaggaaagatatagaaatttcttctacattgagtagaagtaaggataccttccaatttcaagatttaggactctatgaatagggtatcaatggaactagaaaaaataaaaacaaatccaaaagacattctgaagaacagaaaaacaagaggataacagattcatctatagaagataatatttgttataataaatagcatttatggtctgttttatacacataccaagattctttcacacagattatcatttgataatggactttaagtctggggttcttttcattacattatcatctatcatccatcaaaaccacacaccctcaatctaagccttctagattgggaattagaaatatgctgttgctgtgtcctacagtggagctacttgggaaagggttatgatctgggagataagataactttgatacagggctcgtaagcttagatgatagagtacattcgctctctattatgactagcattttaattattattatcttctctgggccctgattttctttagatctagcctgattcctgtcagagagtggaactcgagacctctgataatccacatggccatggagtagagctgtgcctgccaagaatgccaatatgaatgttttatgattgttcttctgtcaatccatattctttattaatcctatacaatttactagtttctcctgtgttcttggaattctgcagaaataatgtttaaggggctttgtgttttactggtcttgccttggataataaaaataatactgcttcaaccttcccagggaactgcatgagtgagttcatgggactcatccgaggtcactatgaggcaaagcaaggtgggttcctgccagggggagggagtctacacagcacaatgaccccccatggacctgatgctgactgctttgagaaggccagcaaggtcaagctggcacctgagaggattgccgatggcaccatggtaagtatgttaactgccacattccagcggcctctgaactccccacccttactgagaggggtggccgtttttcatttctccaaagtcacagaggaagagtcaaaagagggagagttaatgactgcataagtatgtttacatgtatatatactcacatccttgtgtatatactagacttctgttgtggtggtgtagaaagatcgttggacttggagtcagacctgggttctgagtttaagtcccatctcttagttcctacaggatcttgaacaactcacttagcttctctgtgcttcattttccccatctataaaatgggtatagtatccaacccagcagatggctatgagttaacctaacagactgtccaacactattcaaatgtaagggaacattattaatactatgtgaagcctcttcctgtatccttatgcagccctgggcatatgctatgtctcagagtcttctgcgttttgaagtaatcctccagggccacagtagtagcggaggcaggatctcaccttcagcacgtgtttcaagccaaggagggtcaaaaagcccttgcctcactatagtcagggcttgtgagaagcaattctcagctgttttttgcattttcctttgctctgctttggcatggatgcaactgatgggatttaaaacctgttttgtattcttcctgtgtcaggctgtaaacattgaggctgaacacaattgcagctggctgcggtgcttgattttattttatttttgcattcttcgaggtagagtttatggtccacagggagtaattttatgctaaatcacatgcaaatttgctttacttttgaaaataaatgccttcaatgctacctggtttaaaatctatagcagagacctgcctgcttcatgcttgcaaactacctaaacagtgagcattatctgtccgtctgtccactgcagtttgctttcagtcccaaccctggagccagagttggtggagctcctttgcaaaaggagggtgttcagagtcccatttgcttgctttggctctatttcccctttcaagggcctctatggagtttctgtagaacccctacatctcaaagagatgcagtctggcagtctcagttaagctattacctctgaagtctcctggaggtgcagtcctggaggctattctagagttgccactcaataacctttggtcccccaatttggctttgggtagtcaatgttatgagggagctgtgttttacaacagtgaggcgtaggacagggctgtttctatgaggagcaatactttgaattactagtgagaaagagctctcctattaggatgggagaccctgggtatcaaggagccagaatacctgatggcggagggtccaacatcttacctagacctaactttcagtcgtcctcaccatttcccattatataattcagacccaggtctatctacatgccttatccttattcttgtttggagtgattaacttggtacaatagcatcttcaaagtcagctgggatggggcttttgttaatccagccaaatggagaggcttttaagaagcagtcagcaaagagacaatagcaatggccataatgatccttgtatgtgaatagtgctttttaaaaatctttattacttattatttattatttttatggatacataataagtatgtatatttatggggtacatgagatatgatgatacaggcatatgatacgtaataatcacatcaagataaatggggtatccattacctcaagcatttatcctttgtgttacaaacaatccaattatattctttcagttattttaaaatgtgcaattaaatttttattgactatggtcaccctgttatgctatcaaatgctaggtcttattcattttttttcttttatttctttatttatttttaacttttatttgaggttcaggggtacatgtgaagatttgttatataggtaaactgatgtcacaggggtttattgtacagattatttcatcactcgggtactaaacagtacccaatagttattttttctgattctctccctcctcccaccctctattctcaagtaggcatcagtgtctgttgctcccctctttgtgtccacaagttctcatcatttagctcccatttagaagtgagaacatacaatatttggttttctgttcctcttagtttgccaaggataatggcctccagctccgtcgtgttcctgagaaacacatgatcttgttcttttttatggctgcatagtattccattatctgtgtgtgtgtgtgtgtgtgtgtgtgtgtgtgtgtatgtgtgtgtgtatgtgtatatatatatatatatatatatatataaagctcttaagtttaattagatccatttgtcaatttttcttttgttgccaattgcttttgatgtttttgtcatgaaatctttgcccatgctgatgtcctgaatggtattgcctaggtcatcttccagagtttttatagttttgggcttaacatttaagtccttaatccatcatgagttggtttttctatatggtgtatggaagcggtccagtttaaatcttctgcttatgactagccagttgtcccagcatgatttattgaatagatagtcctttccccattgcttgtttttgtcagcttcattgaaaatcggatggttataggtgtgcggccttgtttctgggctctctattctgttccattggtctatgtgcctgtttctgtatcattaccacactgttttggttactgtagccttgtagtatactttgaagttgggtagcatgatgcctcctgctttgttctttttgcttaggatagccttgggtatttgggctcttttttggttccatatgaattttaaaatagtctttcctagttctgtgaagaatgtcgttggtattttgatatgaacagcgttgaatctttacattgctttggatagtatcgtcatcttaatgatgttgattcttcctacccatgagcatggaaagtttttccatttgtttgtgtcttctctgatttctttgagcagtgttttgtaattctcattatagagacctttcacctctctggttaggggtattcctaggtattttattctttttgtggcagttgtgaatgggattgcattcctgatttggctttcagcttgactgttgttggtgtataggaatgctagtgatttttgtacattgattttgtatcatgaactttgctgaaagttgtttattggttgaaggagcttttgggctgagactatggtgttttctagatatagaatcaggtcatctgcaaacagggataggttgacttcttctcttctggatgcactttatttctttctattgcctgattactctttgccacgacttctaagactatgttgaataggagtggtgagagagagcatccttgtcttatgctggttttcaaagggaatgcttccagcttttccccattcagtatgatgttggctgtgggtttgtcataggtggctcttattattctgtgatgtgttccttcaatgcctagtttattgagagtttttaacttgaagatatactgaattttattgaaagccttttctgcatcttgaatagcactgtataacttgcatagcacttccatatgatctcatccagtcttcccatcaagcctgtcacaggaaatcaggcagcgatactcatatccattgttttagacaaaaataatttaatgtatattagagcccaaacattaatgtgggtgctttgggttgtagcacaagataattctattattttccttttgcctgtctgtattatacaaatttccaaatgtgagcatataagaattgtagggtttggtttttgggttttgttttgtttttaaagccacagtggataagaaaagtcagcaattgatgaagctgtaatgtctaagatgcacagagtatttacatattctttctgttgtggacaaaaacctcctgacagtgcaacatccaccattcagacacttctgagatatgacttttaaaagtgctacagccattcctgccatttccttcacctccctctcctccccactccctttttcccttttcccagcccatctcttggtcagagtcctgaaaagacaggctcaaatcccagttctgcgatgacttgtcgccttaagcaagtcgtttcccagctctcagccttaattcctcctctgcaaaatgggaagtatgactttcctcacaaggacatagccacagtaagtgaaggccctcagaagatggatattcccaggattctcccatgtctgcccttggatctagcagacttagttccgtaataccatgaagataatttgaagcttaagggctgaattttattttacagaatgaaacttgaggccctgagaagttaagggtcttgtaccaggtctcaccagcttacaaatggtaggaccagagccacaactcagggcttgagcctgctctcctcaccactctagcacacaaatctttgatttgttattggaagatttcacctacccataccttctgttgacatctaatcaaatgtgtttattatctatctcacctcttttttctcatccccatcgtcacttcctccaggcatttatgtttgaatcatctttaagtctggcggtcacaaagtggggactcaaggcctccaggtgtttggatgagaactaccacaagtgctgggagccactcaagagccacttcactcccaactccaggaacccagcagaacctaattgagactggaacattgctaccataattaagagtagatttgtgaagatttcttcagaatctcatgctttctggtagtattggaggagggggttggttaaaatgaaaattcacttttcatagtcaagtaactcagaacttttatggaaacgcatttgcaaagttctatggctgtcaccttaattactcaataaacttgctggtgttctgtgg

SEQ ID NO: 694 - DNA, 8057 bp, Homo sapiens
cgagtgggggttcagagcctgctcgccccagcgtcctccaggcggttggcagcgccgccggaaggtgagggggggcggggacggcaccgggcaggaggtgagggccgggaccccggacgcgaggtgagggcgggcgctggcacccggagagcggccagggaggcgggcccgggcgggagtgaggaggcggggacgggcggggacgagcggggatgcggggacgcggccagggccggggcaccgggcgggggcgggggcggtgccagtcggtgtgggcgatgaggtcgggaggggcgggaactggggagtttcgccaatcggtgcagactccggttctccccaaccccgggcctgggcagctgggcactggggcgccgttccccacccggcgcggacttcggaaccggccctgggactgactggctctaccactcgagcgcgtctccgctggacccggaaccccggtcggtccattccccgcgaagatgcgcgccctggcggccctgagcgcgcccccgaacgagcggctccttccccgggaccccgcggctacccgggaccccgacgccgcgcggccggcgcgcaggagcgcagtggagaggctggcggcggatcgcgccaagtatgtgcggggtcggccggggactggccggggcgtcgcttccgagggcagcggcccgggggcgatcaagtgcccggggaacgaccctgggcccccggcccgcgccccggccccggtggcgcgcagggctattgcgcggaagccgttgagaccggactcgctgatcatctaccggcagaaatgcgaattcgtgcgaggatcgggcgccgacggccccagggcaagcctggtgaagaagctcttccaggggccgggtaaggacaaggcgccggtgccccggacgggagacgagggcaaggccgggaacccggagacggtcccgaccactcctggccccgcggcggaccccgcaatccccgagaccccagccccagccgcgcggtccgcggcgccctccagtgtcccggccgcgccccctgggccagagccgcgggtggtgaggcgtcgggggctgcagcgctcacagtcggacctcagctcccgctattccgctgccttggccgagtctgacaccttcttccagtactgcggcctggaccccgaggtggtggaggccctggggagggagaacttcaccgcggggtcggactgtgtgaccctcaaggtgcgcagcgtgagcgtcgccacctccggcagcggcttctcccggcacagcggcggcgacgacgaggggctgcaggaggaggagctgatagagcaggtgcccagcaccacttcggtcatcgagaggaacgcccgcatcatcaagtggctgtacacctgtaagaaggccaaggagacccccagccaggagcagagccggacccgaggtgtgtgcccagaaggctgggggcggggctggccgtgtgcggggctgtgaatcttggtgagtgtgaccgagctgggcgatggccagttacagctgcttagaattgagtgcgattttgagctacagtgtgaaagggacccaagagactgacgcagaggcttgtgagttgagcccccgctgctgaagagcagaaggtaccaatccaggcacctgctggtccaggcccttaggagtctgctgcgtctggctgcctggaaaggcaattctgcaaattaatatgtcccatttggcttattattgtgaaaacaggagaaatccaaaatgctgccagaaagcagttttacacccctagtattctttcctgagctgaaaacagcttgagagccctagttcctgagttcattgacctgtgctgtgggcggtcctgatgtttgattggagctgaccagtccacctgcagccctaggtaggcgctgctgtgttactggaacagaaaggaagactccctgcactttcctggaggcctgtgctgaagtggtgagaacttctccacaggatcttgtagcactttggcattcacttagcaacaaagatctttatttggctaaattttatttaaattgttttgagagcttcaggtttttaaactggggaaattggactagattgtaactagagtctatagtttatttgcctctgatgacactacaggaagtaacctccctttggacaaccagtagtgccggattgacctcgagctctttttgcttttcactggggaactgaggagtgctggtcttcactgttacctgctcttccctatgggcgtcttggaaagtagtgaagagaaagaaccttttcagggctgtctttgagaacgaacaatttaaactttgcgacatcttttttttcctcttacccttcaatgacaacttgctataagtaaattttaaaaatcatgagatgaaattattttctgccattgtgataaactaagtgaagatgcatggcagcctgtagagtttgggggaggctgcccaagagatgtttgcacagggctcacctatgtttgacagctaaaaatatctccaataatttctctggctatgactttagtacagacatgaaaattaatgagaagaagataattcattctttttcttgaactcagaaggctcaggacttaagttcttccttataatttatagaagatttgtgttttccactagcctaagttcccaacaaatatatataggcaaagttctaaaaagcaaacaaacattaatttgtagttttcacaaattgtcttttggatctgagatgaatgaatgctggcaagggtatttccatgatggcaccatgtgtagggcaggagctttggagagtggccaggtccgtggagggacagtgtctggtggatagagcactaaaccagaattaagggcctgtcttatgttagcaaatgattcctgcactatagaccaggcgtcctttgtccataaaaagaagggagataggcggatggttttcaacctctacattttctagtctgtgtagtaataatctgtgttgcatgactgaaacccagaaatggaaaacaaacaaaaaaaagttgtctattgaagtacgtgagaagtaaatttatgaataagctccctccaggtagccatagcatgtgcaggcagtaggtagacttggtggtataaatagtggggaggtaataatgtggcatacaaatgaaaccaaagtaaaacctgacaacataaaaataaaagcagcctgctctgatccctccagacccaggctggttcccatctcgaattagccaatgtcaaaagagtgacctgaatgagaatttagttgacttcatagactaaatcctaaagaccttttaggcttggacctatgaaaaatataagaagtttagttagcttgtgagaactttcacttttatgacaaagagaaatagttgaaggaagagggaaagtgagagcaggtttgggaaggcactaaggatggaggcaggaaaaaggctcatgggcttcttcctcccctcatgtctccctccacctgaatcccgtttgttccagactggagacaatggcaactgtcttctgagaagtttcacattatttctcagagcaggggtacagtcccacagaagctaccccagtttttatatggaattggcagtcaccagcactataaagattttctttactaatgtacttccctagacccaaaacagcacaggcctctttgaaactgcaatgcagagacttactgcccggctaccaggggtggggtgtatgaggagaacagagttgcctgggctttctccagatcaccggaacagtgtctgctcatgaccttagccccttcacagctccccacctcccagcactggtgttcccactggaggagaccagcagggaaagccacgacagagtgtgaacacctggtcagtggggcggtcctctgacttcctgcagaagtcccttgttctgagaccagttctgcaacttctggaagatgtggaagcaggaatttaagctgtgctttttctgctgaaatttataaggattcattttaggatttcttgaaagattcagaaaacttgagacgaacaaaggtaggttttctaagtgaaagagaaaacaaatatatttggaggtttttgtcctcttggtagatagagatttacaacttataataaaagtgtctcaattataatagaactaaatacgtttataagtttcttgccccatggggtaaagataattgcttttcaaaactgagactatcacaactgggcaatgactcgtataatccgcacacaagtcctctggggaacccatgagcagtagttggttgtacatgggtaattttggtattctgtttcccagagcttagtttatgaaaatatctcttttatctgctgtgatgtagtcatcttcctgtctttcaattcatcaaactagggacttgtcaaaatttagatctttctggttttctgttttgcgtagaatatataagttgctgcttttaatactggcataaataacttgtcctttgggaaattaggcataaaacattgcttaatttcaaggcaaaaatgttcggacaattccacagctatcttcacatttatccttgacacaaagaaaaaagaaatacctgtagaagcgcatcgaaagctcctggaacagagttgtgtctcatatttgcaaagatgcagaaaaaataaacccgggacatccagctttcttttcctttcttctttgactattctgagaagctatgcgactaggagcacattttaggtaaacacgtggcttgagtagccataaggccactcttccctgtcgtgtgacccgcgcctgggcctttaagagatattggtgtttgaaaagggaggaatctgtttgccctcagatatttagttcaactgcctgcattgcttcctattttgttgtccaactctgtagtagttagcactggccttaccaacatgtaaagaaattttctttactgccccatgagtagttggaggcaaagagaaatttttaaagcgcagaaaaaggcctgcagggagatggaatttgttctgccagagaaacgagatgatagctgtatttaataaagttactgacctcttgtcaaaatttaaaacgcaaaagaagatgtttcaaaatgcagagaatgtcagaaaacaaaaactacagggaccagaccagtataatgtttagttttcattatactaacttttgtctagactggagttgattcactattttttctttaactcctcaggaagcaaaccttcccgatgatgaagacttcttgaaggatttcatgggtgatttgggatcccaggaccatttggctagtgtgcctaggtgaccacatgattgctgttttaccaggaatgcagcatcccattgacaaaacaagtgctctgagaaggtttaaaatactacagagaatatgggaacacagaccttgaaatttagctgagttgtaacagctgaaactccaagaggtgtcttccttgtttgaggtgaaactagtgttgcttccagagggcagctggaaaccgtaaagctgtttggaaatctttttgactgacttgctgacaaagaggtactgtgatgcattttaacaatatctaagttgatttttttttaaatcaaggaaaataaaaaccaagcatgaatgctatggtatgtgccccttttgaccatcctgggctgattaacatcatttaaatcaaagtaatcataaaaaggcatattctacttcaattatgtggtcaaataagagtaaacacacacactcacacatgctgaccccaattgccagagcattactgcactataaattacggttaattcccaaattatactactgtttatcttatttaacaagtcagaaagcacttttaaaataacttgagggctacaaggtcattctattaatgtcattctccattcgggttgtaggcatgtggaagtacccattaaaagataagttagagtttaaatactgataaacaaaaccttttattgcaactggacagtttctggagagttagcggaagaatcttggagtttcctttggtcagatgaatacaacatttcacttttgcagcactatttagaatgtactccatggttctcttgttcccaacttccaaaaagaacagaaaactttggtttacacagaacacgggcatctgaggcaggacctcttccctgccctttgatctgactcacacctccacatatgacgtaatcaacccaaatttgacaccaattcactcttttctgcaaagggcatattttgaaacaagggacagcctgagggcggctataatgagaatgttcatgggggttactgggtccctaattctgaacttgcttatgacacccagagtgaatagattcagattcagaaccttctgagaaataacccaaagaaaatttgttacccagccaattcttcgaaagcttaatatcaaaatatatcttttcaagaagaaaatcgttagagagaagaatgtggaggggagagaaatgggtttctcattgatatgatattttgttaaccatttcattttgaattattcaagttttggttaatattgtattcttttttcgtaactattttaccgtgagagtaggtcattgggttacttagatatttatttttacacagttattagtcttcagatagttttattttacttcatatgattttagtttttgtcagtataattttaaatcatgtttttcttggtcatctctttgtgtatattgtgtaattggattttcattgactgcaagtggagtgtttgccactcaattcagtactcagtactatggtgacttgttttcaaataagtctcagatacacatttagggagcctttgctggccgaatatagactctgtcaggacagcaggtcccctgatctaagaattttccccaatggttgctctaaaaatgctgctattttgctgttcactgtattgcacttagttaaaaagaagataatgtgaaagatgagagcagttttttaaaggatcttttcatatacccaattcccttattttcagatgtcccatcaattttagatatgaaagctttaagtaaaagtgtgtatgcctttctactgtcagaacaggatggatgcagcctgggtcagatttatttaagataaaaatcatgcagactcatcattcatatcataggtgaaaaatgtaaaaaccaaatggtttccactaaagccaccaagatcttttagaaatgtttgcacctttggtggtggcacaggaaaagagaagaattcagctggagtgaattctagaagtagatatcagaaacggggcatgaagaacaggggaactgggtggcatcagactcctaaagaagtgagttaattttccttcccttccattcagattcatgccacagctccatatcttgagtatgtgtaagaggtgagttccttcttcagccaggggcggtggctcatgcctttaatcccaatgctttgggaggccaaggtgggaggatcacttgtgccttggggttcaaggttgcagtgaaccatgattgcaccactgcactccagcctgagtgacagagcaagaccctgtctctaaaaatatatataaaaagtaaaactaaagaacttcttgcctaaacctgaattaccgcaatttgctgagtgactttgagaaaaatcagactgtttagttcagtcgggatgaaaagcttgcgattgcttcccacaagaatgggcaatagtgacggctgcaaggtacttttatttgttcatgaaagaacgacaatttttcaaaatgtaattaaacataatagaatgttttaaactactgggcactgaaactggaagaaaaaggaggctttattgaacattcccctttttcagttggttcaaagttcagcactgtggttatcattggtgatgccagaaaacattagtagacttagacaattgctatggcagtttctaaacagagctttttctatacactatttgcaactggagtgcaatattgtatattctgtgttaaagaaataaagtatttttatcatttattaa

SEQ ID NO: 695 - DNA, 9380 bp, Homo sapiens
cctttctgagcagctgtgtttgaagaaagctagtgggaaaagttccaggattacatgtcaggaaactacaagaggtagaaacatttgttgatttaccagtgtttttaacttcctgctgggctgaaaactgcttgtttcgtggaaaagcaaaacttgacagcaaacatctaaaatgaagagctcccaaacttttgaggaacaaacggaatgcattgtgaacactctactcatggacttcttgagcccaacattgcaggttgccagccggaacctatgctgtgtagatgaagtagattcaggtaaggttcctgccctaggcggtgattgcaggtcaataagagtatgttttcagccgggcgcagtgactgattcccgtaatcccagcactttgggaggccaaggtgggtggatcacctgaagtcaggggtttgagatccgcctggccaacgtggtgaaaccccatctctactaaaagtagaaaaattagccaggtgtggtggctcatgcctgcagtcccagctacatgggagactgaggcatgagaattgcttgaacctgggaggcggaggttgcagtgagctgagatcacgccactgcactccagtctgggcgacagagactcggtctcaaaaaaaaaaaaacagtatattttatttatttcctttaagtttcaaaaggcaaactctaagctttcagtaacacctaaagcgaaagaggttctcaatgaagggaaactttctgactattggtgttgacagaacatttaagctcttgggagatcatgatatgaaaattatttaaaagacaagacaaatttttctcattgcccagattcctgggacttgccattgcttcaagcattgtaacaaatgtgttccctctgtcataggagagccttgttcttttgatgtggctatcattgctggtcgccttcggatgttgggtgaccagttcaacggagaattggaagcttctgccaaaaacgtcattgcagaaaccattaagggacaggtcaagtttctacttcatgctattgtttgctgcttttttttctatttcaaacttccttttcttactactcccatactacagtgactaggaatgttctatgaaaatatttgggtgcttatatttcaaggaagtatagcaagaattctccaattgctaaaacctaagtggtacagagatggaaaattttgggcataggctgatgaaccttcagtttgtctctacttggtcttcatcacagctgttgtgcttagtgtgcacagagcacatttataacactttattcttggcaaagtatagtatcttttttttttttttttttttcagacagggtcttactgtgtcacccaggctcaagtgcagtggtgtgatctcagctcactgcagcctccacctcctgggctcaagcgatcctcccactgcagcctcctgagtagctgggacttcaggcaagtgctaccatgcccatctattttttttatttttttatttttagtaaagatgggtttttgccatgttgcccgggctggtcttgaatgcctaagctcaggtgatccactcacctcggcctcccaaagtgctgggattataggcgtgagctaccacacccagcctatgctttttttttttgagatggagtctcactctgtcacacccaggctggagtgcagtggcgcgatctcggctcactgcaacctccacccaccgggttcaagcaattctcctgcctcagcctcccaagtacctgggactacaggggtgagccaccgcgcctggcccatctgggcggatcacctgaggtcaggagttccagaccagcatggccaaaatggtgaaaccccgtctctacctaaaaatacaaaaattagccgggcggatcacttgatgtgaggagttcaacaccagcctggccaacatggagaatccctgtctctaccaaaaatacaaaacttagctgggtgtgatggcccatgcctgtaatcccagctacttgagagactgaggcaggagaatcgcttgaacccgggaggtggaggttgcagcgagccaagatcacaccactgttctccagccttggcgacagagcaagactctgtctcaaaaaaagaaccaccctcttaaccgttatgctttattcgtcctactatacacagcttgggcagtgtgcctacactatgttcaggcagagctggacctgttactcccagttgcttgccctgaggctgtcctaggtagttgatagctgagttgactttttttctcattaaacatatttttttttttggctgggtgctgtggctcatgcctgtaatcccagcactttgggaggccgagaggggcggactgcttgaggccaggagtttgagaccagcctggccaacatagtgaaaccccatctctactaataatacaaaaattagttgggcatggtggcacacacctgtaatcccagctactcgggaggctgaggtaggagaattgcttgaacccaggaggcagaaggaggttgcagtgaactgagatctcgccactgcactccaacctgggcaacagagcgagaccctctctcaaaataaataaataaatacaaatacaaaaattagccaggcatggtggcacacaactgtaatcctagctacctgggaggctgagacaggagaattgcttgacagggagggggagtttgcagtgagccgagatggtgccattgtactccaatctgggcgacagagcaagactctgtctccaaaaaaaaaacataaataaataaataaataatttgacttgaacttgttttaataaaaaaaaatatattttgaaacagccctaaactcagggaaaggttgcaaggatagtacaaataatttctctcttgaatcatttgacagtaaggagttgacatatttcatcaacccctaatacttttatacttccctcaaacaagaacattctgtaatgtaaccacaatctaaccatcaaaaccaggaaattaacattgattcattatcatctaatccttagatctcattcaagttttgccatttgtcccgataatgtaatttatagtaaaaagttgtaggccagaatcacatactgcatttagttgtgatttctctttagtttccttcaatctggaatttttccttagtctttccttgattttcatgaccttgacacttgaagactatggtctatcttgttgaatgtcccttaactggggtttgcttgatgtttcttcttgaataaattaaggatatatacctttggcaggaatatcacagaagtattgctgtgttctcagtgcattgcatcaattggcacaagatttcattttataccagtattgatgttgttaactttaatcacttaagatggtgtctgtaaagcttctcctctataaagttactcttttcccctttgtaattaataagtgttttatggagaggtactttgaaactatgtaaatatcccacatctcatcaaaatttcattgcattcatttcttatcagcattggacccatgaattcctactttattctgtggattataatctgttaacatcattattaatttagatgctcaaatcatcctagttttagctagtgggagtcctttcactctagactgcatctctttgatgtgtctctattattatttgagtacttccttaatttctgacagaatatcttatacttccctagccccaaactgaaatcaaccattctccagagagctctggtttcttttattttttgagacggggtctcactctgttgtccaggctggagtgcagtggcacgatctccgctcactgcaacccctgcctctcggattcaagcaattcttctgcctcagcctcctgagtagctgggactacaggcacacactgccacgcctggctaattttttttttttttttgtattttagtagagacggggttttaccatgttgctcaggctggtcgcgaactcctgagctcaggcaatccgcccaccttggcctcccaaagtgctaggattacaggtgtgagccaccgcccgcctttttttttttttgagacggagtcttgcgctgtcgcccaggcaggagagcaatggcgcaatctcggctctcttcaacctctgcctccccggttcacctgattctcctgcctcagcctcctgagtagctgggattacaggtgcataccaccacacccagctaattttttgtatttttagtagagacggggtttcactatgttggccagactggtcttgaactcctgacctcgtgatctgcctgctttggcctcccaaagtactgggattacaggcctgagccactgcgcccggcctctggtttcttttaatggagaatgatatttagaaatcaagatctaggtgctctcccacatggatgtccttttcagcttgtttgggctctgatattcagctctgaccacccttggcccccctaaatccccacagatcttgcttggacccacctaatggattttagattccatttttgaaaaagaaagaggaaaaggaagagctactcaattattttaatgaattattattattttattattaattctaattaactactatttttgagacagtctttctctgttgcctaggctggagtgtagtggctcaatgatagctcactctagcctcaatctcataggcttaagtgatcctccaacctcagcctcataagtagttgggactacaggcatgtgctaccatgcctagctactttttaaaatttttcatagagacagggtctcaatatgttgcccaggctagtcttgaactcctgacctcatgtgatcctcccactttcgcctcccaaagtgttgggattacgggtgtgaaccactgcattcggtcttttttttatttgagatggagtctcgctctgtcgcccaggctggagtgcagtggcgtgatctcggctcacttcaaccttcgcctcccaggttcaagtgatgctgctgcctcagcctcctgagtagctgggattacaggcctgtaccaccatgcctggctaatttttgtatttttagtagagacagggtttcagcatgttggccaggctggtcttgaactcctgacctcaggtgatctcccagtctcagcctcccaaagtgctgggattacaggcatgagccactgcccccggcctttactttagagtctcccagacatttcctagtcattcaagcaatacctttacaatttaaccagctggactatcacatacttaatatttttctttcaaatcatttttcattcattttgtttaacctaagcaataatacctgaagtcatgggtttgatggactacttatgtattttcaagtgcccattaagataacaaaatattaaaatgagaaaagattattcatctactctctaagatttccttagttaccaccagttgcacatttggcactctaagaaacaattgctttactggattcctgcacctgcagcctcctgcactttttgagtgatactctgttgatgtttcctttgtctttcctcagacaggagctatactccaggacactgtggaatctctcagcaagacctggtgtgctcaggattccagcttagcttatgagagagcttttctggcagtgtcagtgaaacttcttgagtacatggctcacattgctcctgaagtagtgggacaggtggctatccccatgacgggtatgatcaatgggaaccaagccatccgggagttcatccagggccagggaggttgggtaagtttgttggggctcctggttttgctaggtatttgcactgtttttgtactaatacctgggattccaattcatgaccctttttgtaaattggaaaccaacaggaaaacaggcttccctattttgctgaaaatgcctagattttcttgccatggaaaaatggagcagacagaagctcagcctgtggatgttggactcgagtcatgctaccttaaatattgactgctgactactgtaaagctaatcttcatttcctacacataatcatctataaagtatattcatgatagagttctaatttcagcctggcttcactccgttcctttgtaaatttctgggtctttttttcctaacttctctatgtgtgtgttagggaagtcagaatcaccttaatagtatctaagaaaaaacagtctttgctgtagtggtaactatataaggtattctaagcccatgttttagtaatcatcagaacttatgctgtcatagagcactcctttccatttacagggtcagtgaaagccttaataagagctacatttcctggagctatctgcagatcatttcctggtttcttaggaagttcctgaaagcaattcctttgactgtaggattttctctgtcttccctaggaaaatctggagagctgaagagttggagctattcacgagactgaacatcacttccttgttgactgattgggtgattgattcctgggaattcaaacaaacaaataaaaaagcacttttttcattttatcagaactgaacttagctgaataagttattttttactgattgttaaagttgggagcagctgccagaggcctgcagagttggtttttgttttgttttgttttgtcaacttaatgcaaaccacagagattttctactttctgttttcacatgagttttaatgaggttctgttgaagcaaagacccctagacacaaagtaatgacttgttagtagtggaattataagcaacagggcaggcctttgctggaggtattttgagagaaagggagaacaatggaaactatttcttcagatgtagccctgtcttttggtaagaattgtgcctactaattttgcaatttaaaggatttcaggaagctttttggttgaaaaatcttgtttttttttttttagacgtagtctcactctgtcacccaggctggagtgcagtggtgcgatctcagctcactgcaagctccacctcccggtttcactccattctcctgcctcagcctcctgagtagctgggactacaggagcccgccatcacgcccggctaattttttgtatttttagtagagatgaggtttcgccgtgttagccaggatggtctggatctcctgacctcgtgattcgcccgccttggcctcccaaagtgctgggattacaggcgtgagccaccacgcccggcctaaaatcttgttattttaagttgagcattttcattcaaaatcatccctaaacttcatgttaatttcacctgagaaggactattttatgcattttagaggttggaagcaaaaaacaaacaaacaaacaaaaacagttgtttctactaggaaggtcaaagaaaataaaagttactccatttttactgccacaggatgcaggaagtgctggcccacatctaggacagcaaggccaccccagcttagatgaagctagctgcataacacaaagctttaaaagtgtggttcacacaccacttgtggaccttattgaattgctgattcgcattcctagagattctgattctgtaggggtaggctggagcctaggaacctaccttttaaactagttccataggtgattctgatgtacatatagagtgtgacagccatcactatagagaatagattgataaattacaacccacgcgtcaaatctggcttgctgtcttattttgtaaataaagttttattggaatagagcaacattcacttgtttacatattgtccatggccgcttttgtgctacaatggcagagttgaatgattatagaagaccatatggctggttaagtccaaaatatttactagctggccctttacagaaaaagttggctgaccccttctctaaatcaacatttctccttggtaactgaaactctattacagtcctgacaattccagcaaacacagctgtagatagggtttaaactcaaagatatttaactcttctttgggaacttagtctccatatgtttgttagttcttgcataatccacagtttctctgggtcttcagccaatcagagagctctgtagctcctgagtagtccatttctctggccctacaagtgagagtgattggaagcaaagcttatgatttgtatgatcttgtatctcaaaatagtccttaatgatctaatagattagtaggcagtcatcaggtagagactccaaaaaccagactactttcctaaatatcaagaagaaaggcattgctacagtgattcatgaaaagcagcattaataactttggctaaagtttaacaaagctaaccacttcccctctatcagccagccatctatgtatctcctctaaatgcagagaagtaaatatgtagtgctgttaatacatttttgctttttaaagttatgctttgtcctggcgcagtggctcatgcctgtaatcccagcactttgggaggccaaggcgggtggatcacctgaggttaggagtttgagaccagcctggccaacatggtgaaaccctgtctctgctaaaaatacaaaaaattagccaggcttggtggcacgtgcctgtaatgccagctactcaggaggctgaggcaggagaatcacttgaacctgggaggcggaggttgctgtgagctgagttcgcgccattgcactccagcctgggctacaaaagcgaaactgtctaaaaaaaaaaaaagaaaataaataaagttatgctttttcctctattcctagttaaatcacaacaagttagtaatccataaatgatgtgtcctgtttctctttagtagaaattatatttttggctaccagttaagaaacttgtactcctttgtcccttatgttactataaactcaagatgatgagttttgtggtatttgacttcataggcaaaatcaaaatttttactttgttgctattctgttttatgaaataaacttctgtctatgcatttgaactaagtttcagcaaattcaatctaaattgaataattccagctcccagttttatcctatgttgctcataaaacagttccaagtatactgcattatcttgagatttgaagatatggtgcccacggggattatactaggcaaatgcgttaagcagctctggcctaggtgttgtgtattttaagagactctatcttaggagagcttaagtgattgggctgcaggaagaagacattgtaacccaggaattaaaaatggattcagattgcctgattttaacactttagtttcaccataggctaattatgtgacattgggcaagagacataattcttctgtaccttagtttctacatttgtaaaatagagatgatttggtaacttattaataagatttttgtgagagataaataaaacaaatacattttgtaaa

SEQ ID NO: 696 - DNA, 1992 bp, Homo sapiens
cgtgggcttgaggacctggagagagtagatcctgaagaactttttcagtctgctgaagagcttggaagactggagacagaaggcagagtctcaggctctgaaggtataaggagtgtgagttcctgtgagaaacactcatttgattgtgaaaagacttgaattctatgctaagcagggttccaagtagctaaatgaatgatctcagcaagtctctcttgctgctgctgctactcgtttacatttattgattacttacgatgattcaggtactgttgtaagtgctttacatgctgttatacgagactcttgggagaaatcactttaatgaagcttgagacacatggcattgccatgcaatgatttttcccccctcttcacgggatcagagggaactaatagaatgtgacaatgattctttagcagggactgctgaggcttctggttcctttttaagatctgcagtgaaagaagatgagaaacatggatatgcccttcttttggtccccctcttcctttatttgatctctacttccttctataaatatattagggctacattgtccctttgtatttcaaacaaggcaaaaagaggttgtaattacactttactgcaatcctcagtttctccagggaacaggaatgcaaaggctttgaaggcctctctatttgctgacatggtcagctgggtgccatgggccaagtccttctgttgccctcctctgtcaccaagtaagctaggtcctttctgaggctcaggtttgctgtgatgatgatcacttttaggcagaaggttagaggcctcatgagtgctatatggactttattaggctttagatttgatggggaataagggatgtgatttgtcttttgggaactcatctttgattcatcattgtctcttggtatcttggaatttccatgtcattacagtctacagaatgaaagagtaacctgtcccagaggagaggcaggtgaaagactccacagcatgctcattctcattctgtcttctcagtgacaccgaggtttactgagtgcccactatgtgccaagcactgtgctcagggctttctttgtatgcatgatctcagtgaatctcaccaagcctcatctggaaaacggggacaaattaacaacaggatggcaaattgaaaaacacgtaaccatgttctacagatggaaaggggtgcttggttattatgaaggccccctcgcaagcgtgtgggacatgggtgtgttctctgggttgtactgatcagatcaaggacctcccccacccttctcacactctgcccacttccgccctttgcttatcagacccttagccagtgactcattccagaaccagaaccttggtgaaatctcaaccgacaccagagatcggtgtcttcagtcctagactgatggagaaaatccagaatatatactagaagctccaaatgctctgggtttcagctcctctgtgctgtggacactgactttggctcagaactccgatttagtacaaaaggctcatttttatttcaggggcactcttcctaaagcaaacctaataaatgaaatatggaattcacagatacacacacacattaaaaaattaacctagtgtatctgtgaggagtaggcagaaattcactgtataaaagaatgcttcatttcatagagaatttgtgttaagattccattagatagtacatttctcaaagatttttgaggttgtatttgctttaccaaaacttggtttatgtaagtggaaaaagcatgttgcaaaataacttggtgtctatgattcagtttatgtaaaataataaatgtatgtaggaatacgtgtgttgaaagatgtacatcaatttgctaacaatggttatctctgacgtggtgggatttgagatgtgtttttctttttggttgtatttttctctattgtttgacttaacacagaacatgtttggttacaacaataaagttattgaagacaaaaaaaaaaaaaaa

SEQ ID NO: 697 - DNA, 48375 bp, Homo sapiens
agcgattttctctgcttggaagagagtcctctcagaaggggtaaggagcttggagagaggagtggagaaagtggatttaggttagggctgcatggggacagatataagcaaactaatcaggagagaggagagttgacagtgcagaggagggtctgttgtcctcctacatgaaggtagggtaggctccacatactgagaagcactggccaaaggggacagattcttttgctctgggtcccagggtgaggcctcagcagacacagccaactttccagggactctggaaaaatgtgtgaagagcaagaactccctgctcatctctgtgacttctccccagccatcctcacaggcatggtggggagggcagaggctgaagagatagtgggtgagggtggatgacattggctattcatgcaggcttcctgggtgcacatccccacttactagctccgtgaccctgggcacattatttttaatcactttgtgccttagtttcttcaaatgttaacaataatagaatgtacctgttggagttatcatgagaattaaacgagtcaatattcatgaaatacggcatttattaatacaatcatatgtattaaattgcatgtataaatgtacctatttgttaaatgtaatacattttgtagttcacactgtgaatcaatcaattgaactgtgacttgggtttcaccatgtatgtagctgatttcacataatgccgtgttttttttttagcatattcccaacaacctcctaaactgtgaaacaagttgagaagcacactgtaatgagaggagcacatcctactcactctcttgccccctaacacggtgcttgtgtccaaagaattaagtcagagtaacctttaatggtaatggaaatttgaggccatgaatattcactgagcctctctctgtccccttattgataggcatcacaataaagcaaattttctcctcctacttctctacagtggcagataggtcgaaagactcactgacatcaatgctattgattcataaatgtgtattattcttaaatttctattattagcttcttggtcatcacccactagactgtggactcctcaagaacaaagacctcagtcttacttatctatttgttttggtatcaacccctactccccctgtgaacacatggtaggtgcttaataagtacttgtaaaattggctttcatttcagtccctccccattccataatgccccattctctaccctctttagttcgtgcatttggctaaagatcaaagatcaagttggcctctttggctaatttattctttttttttttttgacgcccagcaggaaacgcagttaattttttcttaaatacccttgtgaatgtgccaaccagttgacatttcaggggtagtatgcttagtaatagacaattgtgtcatatacctaaaacaaggttcagggtccatgattctctggtctatcagcagtaacaactttctgtaagttactaataatgtgacgttgcaacatgtgggtaataaaacagggaatcaattgacttatggaaggctaaaattagaaatgagctcaggaaatgttggtatcactcaacttcccagtcctattttacagataagaaaactaaagatcagagaaggcaaagtattttgcaggttacatagctggtttatagaaggttggaataagagtccagtttattatcctttctgtggcatacgtagtcattgaaagtgtgtgtcataaaagcacgtaagctacagaagcgtacgggagagggcaggcccacaagcacagctgtgttgactgactaggcaggatacaggcagatgtcatcggtgattctggaagaaggcctggttggagaacatgggcagggatgtggggcaggcatagataagtgtctagattaaacagtgacagtgtggcgtggtgagtacagcatggccttgaaacctgggacttaatcccagatctgacacatatcccttcgttacttaacttctctattgctgaattttttagtcagtaaaaatgtgcccgtaaaactgacttctcagagttgagttaaaggagacaatggatgtcttataatattcaacctagcctcaggaaagagttctgaaagatggtggtttctgacatcctaatggaggtcaagccttgtggtcattctaggaggttaaaattgagagcccatttcccctgtcaatctttgggacactgctggacaatgatgagctcttatgttggtgagggagcacctatcctcattgagctgatagctctctagatcaggggttggcaagctatacgccatgagttagaatcagccagttgcctatttttgtaggatccacaagctaagaattatttttgcattttaaatcactaaaataaaattttaaagtaataatttgtaaaatgtgaaaattatatagaatccaaattttagtgtccacaaagttttattggaacacagccacactcatttgagtgtatataatctgtagctgcatttgtgctgtaatagcagagtataatagtcatgacagagattgtatgtgatgctgtcaccactgcacgctgaaacagaacactacacatcccagtgatgaagctatgactcaacaatatttcaaatgccatgcatatggtcataccgtgacattatctttctttctttctcccttccttccttcccttccttttctttctttctttttctttttctttctttctttctttctttctttctttctttctttctttctttctttctcttttctttctttctcttctttctttctttctttgtttctttctttctttcttcttcttttcttttttttttttttgagatagagtcttactctgtcactgaggctggagtgtagtggcatagtcttggctcactgcaactctgcctcccaggttcaagtgattctcctgcctcagcctcccaagtagctgggattacaggtgcctgccaccacacctggctaatttttgtattttttgtagagacagggtttcaccatgttgtccaggctggtctcgaactcctggcctcaaacaatctgcctggctcggcctccaaaagtgctggaattacaggcatgagccacagcgcctagcccattttcttttctttttattaaattaccaatgcatacccatcatgtcaaaacaagaaaagaagagaaaaggggactttaaatgtcatgcatttaagtcacagtatgaattattttggggtgtggaatagggattattttgttatcaaaatagatggcaaagcattgtgtgtactatgcaatgacagtataggtaggctaaaataatagttcatgttaatattactacactaagcacatatcacaatattcccaagtcataggaaagcagccatagaaaaaaacagaaaatttaaaatggaacgtctcatcatagcagaatttcttcttaaaattaaataatgaaaaggaggctgcaactaaagcaagtttctgagtgcttcatttgtaagccaagcaaggaaagccatttagggatgagttgattacattgtgtttgattgcaacagccaaagaaatgtatccagaggaaagaaacttgttcaagaccatgcaaaacttgcttaagactgctttggagagaatagttgctcggagagttgaaatcattgggaacagtatcaacagttaatttaaaaacaaggcaaatgactttgggtggttttctttgaatcttgatgagctgacagttgctaccaatacggctctgctgtttatttaaggagtcaatgacaagtttgaaatgactaaagaattagcctatatagcctctgtggaacaactataggcaagaataattttaatggaattatacactttaaatgggtgcattttataatatgtggattaaatctcaataaatctgggttttttttgttgtttaatgaatattttcaaagaacttagaaatgcaatattttggtataaactgaagtagactcctctaagatgtattacaattgacggtggtagaaatatgttggaacagaaccatctgcagttgggcacgcttgcaaagcttgtaaaattgtgaggcatttaaaatatatggttattcactgtacgcaggagcaagtattttgcagaaaatgtttgaatacatcatgtgttattgaaccagtagtgtcgagtgagccttataccctctaaatagacttaatcatcattggttccatgaatttttgtcagatagagaagctgaatactctcactcaccctactgtacagcagtttcatggcttagcagtggcaacattttattgcaagtttttgagcacagtgctaagattaaaattttgagtcagaagaaccactttcaaccactattatcaaacactggatggcttttgaaataatctttggttgaaggttagataatacttctctttttttgtttgttttgttttgttttgttttgttttttggcttgagatagagtctcgctgtcgcccaggctggagtgcagtggcccaatctcagctcactgcaacctccgcctcctggattcaagcgattctcctgcctcatccttctgagtagctgggactatgtgtgtgccaccacactcggctatttttgtatttatagtagcaacagggtttcaccatgttggccaggctggtctcgaactcctgacctcaagtgatctgcccacctcagcatcccaaagtgttgggattatagtcatgagccactgcacctgagcagataatgcttcttaatgaattcaacttataattaccaggcaaaacggcacttacatgcaaattttatccttcggtaaagtcattttaacaactgatgttgtatgactcatgagtaatgtaaagcagttttccttacttaccaggtggtcaaaagttacaatgagaagcaagatctcccttcccacacaaatttgcagcagacatattttatgaagttaaactatcgtctcaacagctgctttctgtcccccagtgcaagtgcaaagaaagttttttgaaatttccgtatctcaaaatctattttctgtggtcattgcaaaagattatgtgtagcagaggaaggccttttctgagtaaaaatttcctttaagtcggtcctgtctcaaattgccctggaggggtttccatctaatcagtcctaactcattaaaagaaaaaaattctttttttttttttttggtaacagttttattgagatataattcacacaccaaacaatttaattcactcatttcaattcagtgcatcagccaggtacagtggctcaaactgcactttgggatgccaaggcgggaggatcacttgaggtcaggagtttgagaccagcctggccaacatggtgaaaccccaactctgctaaaaatacaaaaattagctggacgtggtggtgagcacctgtaatctcagctactcggaaggttgaggcaggaggatcacctgagcccaggaggcagaggttacagtgagccaacatcatgccactgtactccagtctgagcaacaaagtgagactctgtctcaaaaataaaaaataaaaataaaaagtaaattcagcgcatcaccacaatcattaacaatcaattttaaaacatttccatcattccaacaagaaacctgaacttctcagccatcatactccaagccccccatgcccctcaatcccttgacaactactagactgtttttcgcctctgtggatttgcttattctgaacatttattataaatggaatcatacaatatgtggtcttttttgtctggctcctttcacttagcataatattttcaaggttcatctatgttgtagcatgtagttagtacttcattcctttttatggtcaaataatatagacggtccttgacttataataatttgacttatgatcttttgactttacagtggtacccatactgttttcactttcaatacagcattcaagaaattacatgagatattcaaaacttattataaaatagactttgtgttacatggttttacccaaccatagacgatgtaactgttccaagcatgtttaaggtaggccagattaagtaataatgtgtggtaggttggatgtattaaatgcattttcaacttatgatgttttcaacttataatgggtttattggaacataactctattgtaagctgaagagcatctgtattccattacatagatataccacgttttgtttatctattcatcagttgatgacattgagttgtttctaccttttggctattatgaataatgctgctatgtatattcatgtatgagttttttgtgtggacatattttcatttctcttgagtatatatttaggaatggaattactgcatcaaaatcataactctatgtctaactttttgaggaattgtcatactattttccagattggctgcaccattttacattctcactagcagtgtatcacagttccaatttctccacgtacccaccaacacttgcaattaccttttttgttgatggttattctagcgactatgaaatggtatccagctcactcttaattctccaagttggggcaatggggaaagcaatcattcatactactccatgcttggtccatgtgaggacaccaccctaggagctcagctctgtaagaacttcaggttatttccattgaaaatgtaagtttttttcaaggtaggaaagaatcccagagattacgtcctattggtaactagtttttattttctttttctgtttttttttttttttttttttttttttttggcagagtctcactttgtccttcaggctgaaatgctgtggcgcgatctcggctcactgcaacctccacctcctgagttcaagtgattctcgtgcttcagcctcccaagaaactgggattacagccatgtgccaccacatctgcccagtctttctttctttctttctctttctttctttctttctttctttttctttctttctttctttctttttctttctttctttccttctttctttcgttctttccttcgttctttcttttccttttcctttttttttagatggcgttttgccatgttggccaggttggtctcgaactcctggcctcaagtgatccacctgccttggcctcccaaagtgttgggattacaggcgtgagttaccacgcccggccaataattagtttttcaattcacaaacccacatattatgtcaccctctaagaagccattattggcaatatggagatatttttcaaggcactgtaaatatttgcagggcaggttatttacgcagcaggcattaggatgtgatcccttctggagagttccatagacagtattgccccagcctcacctcttacctctcaccctccttctagtgatttatagagaccctaaaggatctttctgacgaagggaggtgacttgaattctgcaaacagtattaagacaaatgcaaacactgaccaaggctaaattgcaaaggagaaaccaggacctctggagaggagttgctgtaaagaaaggagcctcatgagggagtcaggcccagcatcagggcaggagctcagagggaagggtggtttctggtcctgacctgcatggcagctgctaaccagggtagtgctgagattgggatatttgcccctaaagaaactcaatcaagggctatttattgagtgcctactgtatgcctacccctgctgggtattgttcttactgggtgaacatcacaatgtttcaaggtgaggttttcctgttaaacatgctcccaccatatcctgaatgtgtcctttataaaagtactctgcacagttcttgctgcagaaatgatggctctagttcattgctgtatctccagagcctagaacagtgtctgtccctgatagtgctcatggtactctcaagtatttggtgaatgaaggaaaaaccctaaattcaacatattgttgcaagtttcctttgttatcaactataagctgagttttaatggctacacaagacccttctcatgaactcaccaaatttgtcttgaccaagccacaacttttagacatttatatagttttactgggtgtggtggctcacacttgtaatcccagcactttgggaggctgaggcaagaggatcacttgagcccaggagtttgagacctgcctgggcaacatggtgagaccttatctctgaaaaaaaaaaaaactaaatttttttctttgaaaaacaataatgagaccgggtgcggtggctcacgcctgtaatcccaacactttgagaggccaaggcgggcggatcacctgaggttgggagttcgagaccagcctgaccaacatggagaaaccccgtctctactaaaaatacaaaatcagctgggtgtggtggcacatgcctgtaatcccagctactcgggaggctgaggcaggagaatttcttgaacccgggaggcggaggttgcggtgagctgagatcacgccactgcactccagcctgggcaacaagagcgaaactccatctcaaaacaaaacaaaaaaacacaaaaaaatacaaaaataatgatatatttatacaaatgtatttgagcatatgtctggctatttccttgggataaattcctagaatggaattgcttgatcaagagatagatccattttaaaggtctgtgatacatattgctgaatttccctcctccaaaggctgtttaaataccttccctactgctgtgtttgaggcctgtttcccacacatcattgccaacagcaaccattgccattctcttcatctttgccagttaaataacctcaacatcatggtatctaattggttcccagggctaaagcaatctctaggaaattgcttatgagtatgtgtcaaaggcaaatttgccatcaagtaaaaggtttctgagaaagtcaaatcaaagatttcctctggcaaaggtgacttggagcaacaacaataaaatagaacgtgtagttaaagattatggagatagttgtgagttgagttcaagctttgcatgtctgtctaaatgtcattatgttctcccggaactgtcagctacacggagagactttccaggaatgggttcctattgcattaaagttgataagtttagctctagctctggcattgttcaattttctcttttattagcatgttgtgacatttttcatgtggtagaaaatgtgtatttcttttttagttaactcacctgtttgcttctctgctctcacactttcgaaggccctcttccttgccattcaccctacggtgtgccctagcacagtgttttccaaacctgtcggttttgtacctccctcatgatttttgacaaatcatgtattatcactacactttcttacatatttttgttgaaattgaccttttttaaaaaaataattaactgaattttctttttctttttctttttttttttttgagacattgtctggctctgtcacctaggctggagtgcagtggcacgatatagctcactgcagcctcagccttgaactcctgggttcaagcgaccctactgcttcagactcctgagtaactggaactacaggcatgtgccaccatgcttggctaatttttataaccttttttgtagagatgggggtctcaccatcttgcccaggctggtctcaaactcctggcctcaagtgatcctcctgcactggtcttccaaagctctgggattatagtcatgagccaatgtgccaggccaaacttaattttaaaataaactttacagcttggtgtggtggttcacacctgtaatctcagcgctttgggaggccaagatggaggatcacttgagcctaggagtttgagacgagcttgggcaagatgctgagaccctgtctctatgaaaaaaaaaaaaatttttttctgatttagccaagcatggtggtacatgcctgtagttccagctactcaggaggctgaggcgggaggctcacttgagcccagcagtttgaggctgcagtgagctgtgacggtgccactgttctccagcttgggtgatagagcaaggccctgtctccagaaaatagataaataaataaaagcaaattaactttacatcaccaccccaaatttagaagaaaaaaaaactagtttcctttgccatggatagaaaatagccataagaaacataaacaaaaataaagtgttattagattaccaggagtttggttgccaaaggctctgtgtctggggcctgagctctcttcctcacaaagagaaatatgtaattattagagaagagttaaagatatcttagcaatacatgagattttctcattgtgtaatcagaatgactgaaatttgaaaaggcataactttcccctccaagtgaatcactgttatctaacgctgtgtccatggacacttaaaatcatcttgtgtgccacgaaggcagtggtcctcagagctgagcaccagcagagtcacactaaaaatacaaaaattatccaggtgtggtggcacatgcctgtaatcccagctactcaggaggctgaggcaggagaatcacttgaacctgggaggccgaggttgcagtgagctgagatcatgccattgcactccatcctgggcaacaagagtgaaactccatctcaaaacaaaacaaacaaacaaacaaacaaacacagattgctgattcagtaggcctaggtggggcctgagaatatgcatttctaaaatgtttccaggtcatgctggtgctgctggtctggggaacacatttttgaggactgatgccctagttgtatcatctctcattttaggaataactggactgggtaaggctgagaggtacaaaccccaaagaggggcaaacctactcccacccattgttttcagttttcctcagagcaacaagtccaggcctggtgctagcatctctgaggacaatgttttaatctctggaaccactcgcttcctctctgaagagatctgaattacaatttgtggccaccgcaagagctttctgatctcagtcaaacctcccatagtcttgatgggtgagtagaggaggaagtgggtgagaaatcaaactccttcctggggaaaatctctttatagaacttctccaagagtttcattccaaaagataataaaatgaaataaaataacaaaataagaagcccacaaaatctctcatgatgtgaaatttatttttagagctgactaaactcagtgaggtgagtagataagcaattgtgaaattttataagccaagactcaaaaagccaatgcctgctccttttgaaggtcaaggtgttttggaacacatctccagtggttaaacacatggctcggcgcagcggctctcgtctgtaatcccaacactttgggaggccaaggcgggcagactccttgagctaaggagctcaagacaagcctgggcaacatagtaagaccccatctctattaaaaatacaaaatttaggcaggcgtgatggttgcaacgcctgtagtcccagctacttggaagtctgaggtgggaggattaggcggaggttgcagtgagcagagattgcaccactgcactgcagcctgggcgacagagtgagaccctgtctctcaaagaaaaagaaaatctatacattcgtacttgaccctttctctgagcccattacatcgtgggtgtaagaagtggaagtcgccatgagagtgctcgaccgccgtcctgccacccaacaaagcaagtcattttcatgtgttcgtgtttcctgccagcgcttatctttatggaggcaaattatggaggcatggtttttacataattagagatataatgagaatcctgcctcttcaacttctattgtagtagaataagcacttccccataagcacttcccctcacggctgcggtcttctgcatcgtaccgtgtgtggatagagtcctacctctcatcaagggtggtcaccacatttaaacctctgttgttgggtaaggttgttttcaattatttatactgtatatatgtaatactgcagcaaacatatctgtacatataattttcccttcatttgaaattattccttgaccaggcactgtggctcacgcctgtaatcccagcacttcgggaagccgaggcaggaagattgcttgaggccagagttcaagacccccgtctctacaaaacttaaaaaaaagatttttttgaagaaattatttaagataaagttccagaagtaaatttctcagtcacagggtaaaaacttttttgtttgtttgtttgtttgttttttaagacagggtctggctctgtcacccaggctacagtgcaatggcacaatcacagctcactgcagcctcaacctcctcccaccggctcatgaggctcaagcaatcctcccaccacagcctcctgagtagctgggaccacaggcatgcaacaccatgctcgactaattttttaattttttgtagagatggtgtctcactgtattgcccaggctggtctcaaactcatggacttaagtgatcctcccacactggcctctcaaaatcatgcccagccaagaacatttttaaattgctcttaatacctgttgccaaattgtagcatattacaacgtagcaattgtaaagcatattgaattatttgcacccccaccagagttggatatatcattgtacacatttttaaaagatgtaaaatattacaccagtgtggtggctcacacctgtaatcccagcactttgggaggccgaggcaggtgggtcactagaggtcaggagttcgagaccaacctggccaatttggtgaaacccatctctactaaaaatacaaaaattagccaggtggggtggtgtgcacctgtaatcccagctactcagtaggctgaggcaggagaattgcttgaacctggtaggtggaggttgcagtgagcagagatcatgccactgcacactagcctgggtggcacagtgagactccatctcaaaaaaaaaaaaattaaaataaaaaaaaagaggtaaaatataatctcacttttgttttagttgtaacatctttaagatgagtaaaggccgggcacagtggctcacacctatgatcccagcgctttgggaggccgaggcgggtggatcacgaggtcaggacattgagaccatcctggctaacacggtgaaaccccatctctactaaaaaataaaaataaaaaaattagccaggtgtggtggcgggcgcctgtaatcccagctactcgagaggctgaggcaggagaatggcatgaacccaggaggcggagcttgcagtgagccgagattgcgccactgcactccagcctgggtgacaaagcgagactccctctcaaaacaaacaaacaaacaaaaaaagatgagtaaaaagctaaatattcttcccccacatatttacttactaataatattttctcttttgaataatttgatcatgacaaccaacttttggaagataaattgtctgaatgcactgtgggtctgaagaccccaaactgtgtcttatttctttgcattccctgttccctgcacctagaacaaatcggacggccttcattcattccttcctttcttccataaatctttactgagcacctgccatgtgccagctgttctggatgctggagacagaggagtggacagggaagagaaactctcatggaagttaggcaacaggtagctaaaccagcaaagagacaaagtaattacatattgtgatgagggctatggaggaaacgaactgaggtgggatggtcaggcgagtagaccagctcctttagataaggcccccaaggaagatctggcctgtcgttctcctgcttaaatgttcccatggcttctgccattgtgcttagaataaaatccacattcctttccacagcctctaagatcctgtaggatcaggccccagcctgcctctctgacaacatctccccccagtctcctcctaaatcatggtgctcttcaaacacaccagacttgttctggcctcaggcctttgcacttactacttttctagctggaatgccctttttctgatgtttatatggcaggcttcccttcaatagcagctctcagttccgatatcagctcctgcaagaaggttttgctgaccatcctatttaaagtagcacctcataccccacaagtcactatcccattgttgtgttttattttcttcagagcattgaccactctctaaaatcattgtatttaattactttttttgccgacctccactacccatgatctcacagaagcttcaggagagcagagaccttcatcatcttgttcactgcttcatcttcgatacctgatggatgtgcagagatgcctcgagtacctgggagtgactgaacagccccctcctgaacattactcatgtaaagcaaccattcactgaaaagttaatttcagagggtataaaaagcaagagtggaaatggttctgtcaatgtgtcatcaattagacatttgagttgggaatattgcattccacaagtcatttctctgggaatggtcttctgaattagagaggaaaatgctgatcagcttcatgtagtatctaaatgtgatatccgtaaatggtagtagtgactctgggaaggctatactcacacctctattgaggggctggaattagtgagaaggagataggagcttaacatgtatttacatttggttctatagacagaaaataatctttgggtctaactatttaatcttgatagaattttatgttttaatgatcctctagagccttatcatggtactgcagtgttgcagaatcaaagtagccaaagaggagctcttttgtttgagacagggtctcgctctctcgcccatgccgtggtgcagcagtgcaatctcggatcactgcaacctccgcctccagggttcaagggatcctcctgcctcagcctcccaagtatctggtactacaggcatgcattaccatgttaagataattattttaaaattgttttgtagagacaaggtctcactatattgcttaggctggtctcaaactcctgggctcaagcaaccctcccactttggcctcccaaagtgctgggattacagatgtgagccacctcacctggctagagaggctcttgatggatcaaattctaattctaaatggctctgatatagctctcttgagtttatgcctaaataactggatattgctttagattaatgggcatgtcccattcctctgcatagtcaatagaattattgaaaagctcaccctgaacaatagttcttttgcaaccaggtaattatgggtaaacagctttttttttttagctgacttggtgacaacgttaccaacatataacattgtttctgtgggaaaatggagtctgtgttcttgacttatagataaatacttagaatttagccatttcatactaataaatatcaaccctttttcctatccaggttttgagttctgtgagaagtaaaacacagagtacaacagatggagacaaaatattacttttatagaagcttatttttgagaatgtggcttagggctccctccttctggatccttaccttcttgggcacaacaatcctgaatccaggttatctccccaaatggaaactgcaggatctgaggtgagtattcccagtttattctgaaataagtcactactcttcctttagggcaaaatgaataaagacatgccaagaggccaggagtgtttcaggaattaaactccctccattagtgaggaaacatcagccctgaggaagaagaagtttccctcatgaaagctctgtgtattgtctctgtcatcctgcagtactgaagtcctgtgtggatgctttaggagcgggcataccggtgattgctgatttatactttgaggactgcctgactttctggctgcccatatttttccagatgataaggccagggaagagtcagggagccagatgcttggcagtactccatgccttcctggttatacttttcattctatgctcagcagataagtaatatagaaaaccatggaaatattgacactgttgtaatatggtggcatcagtagacattagtgatagagcactgtgggcgctactcacttgatatcttgaatctaagacatgatggggtgtgataggcttctcccagtttaggagacaggatttgagaccctgcatttgagatcctgcagctacttatgtgaccccaggccactttttcaatttttctagattcctggttaggcttttataaagtgaatatagtaagtttaaaatgccatataaaaatgacagaaaaggagaaaagatttgcaatacatatgtaaagaacttttaccattaaaaaccaagaagaaaaccaattcaacgatacaatgtgcaaattatttgaacaggtactttacaaaagaagagacacgagtgactaatatgcacataaaatgatgttcaacatcatttgtcatcaggagatgcaaattaaaacaaaagtgagatgccactacataccctttagggtagctaatataaagacggacaataccaagtgttggcaaggatagggaacaactggaattctcatatattgctgatgtaaaatggcataacaacttaggaaaaccatttgaccatttattaaaaagttatatagctaccatgtgatgcagccattccattctaaatatttaccctaaagaaatgaaagtgtatgttcatacaaaaacttgtacatgaatacttataacttttttttttttctcgagatgaagtcccgctctgttgcccaggctggagtgcagtgacgtgatcttggctcactgcaaataatacttccggggttcaagggattctcctgcctcaacctcctgagtagctggggttacaggtgcctgccaccatgcctggctaatttttgtatttttagtacagatgaggtttcgccacattggccaggctgatctccagctcctgatctcaggtgatccacctgcctcagcttcccaaagtgctgggattacaggtatgaaccaccacacctggccttatttataatctttttgtttgtaatagtcaaaactagaaacaactcaaatgtccatcgacagatgaattaccaaacacgccatggtacattgatacagtggaatagtgttcagatataagaagaaacaaactatgaattcacacagcaaggatgagtctcaaaatggttataagtgaaagaaactggctcaaaaaacaaaacaaaacaaaaaactacatctgtatgattccatttacataaaatgctagaaaatgcagactaatttatagagacagaaagcagatcaatggttacctggggttggggtggagtataggggatgtagcactaaaaagggacaagaggaaagtcccaaagggtgtgttgggaatgctcggtatcttggttgcaacggtagctacacatgtatatacatcaatcaaaattcgttgaactgtacactgtaaatagatacagtttattgacataaattatagctcaataaagctagtttaaaaagaaaagaaaaacaagcctttgtttaaatcctgatgccaggagttattcaagctgagaataatagcataacataatgggccttagaagtgtctttgctttggaaaaagtgtttaaatggacctctcagccatgtaagaacaaacccctgtcttattcttgaatggagactctaggacaataagcagcttatctgctgggcgatcatacaaaaatgttttgttttcatcaaggtcagggttaaaatttaaacccaaaggccaggtatggtggcacacgcttgtaatcacagcactttgggaggctgtggttggggattgcttgagtctaagagtttgagaccagcctggacaacatgacaaaaccccatctcttctgaaaatacaaaaatcagccaagcattgtggtgtatgcctgtaatcccagctacttgggtgactgaggcaggaggatcacttgagccctggaggcagaggttgcagtgagctgagatcgtgccactgcacttcagcctgggcgacagagtgagactctgtctcaaaaaaaaaaaaaaaaaaaaaaaaaaacttaaactcaaaactctagccacaactcacaaggtatcattagtttatattcctctggctggggctagacacagtagagttggggccctggactttaaggagggaaaattagattaagaagacccaaatccaagcagtaaagctggttcctgacacatggtgagaggtgaggggctgaggaactagagagagggtgagaaagggaactgagaagtggggcctgcccaatgagtggccaggagcagagagatcaaatcagctgttctaagttttctcttttctgtactttattgccaactccccaacacaccagtcacccacaagacttcagtaaagttaggttaaatgccatgatgtgatgtccattgtgcttgggaactttattgggggctgtatccaggtagagtcacagaagcttggagatgtgattacaaagttgctagacatgaccatcagagaggcccggaatggtagtccccagcatacagtgacaaaagttaagcaactaataattttgggaaacatgtaagtcctcttcagggattctcagaactacagctggaggaaagtggtttcctgcactcatatgtgggtgagtagagcacagtttgttattgaatgtttaatggaatggtgacctcctaaaagatggcggcttggagacatttgagatatcaagagattaaccaaactcatgtgccaccaacctcacaaggatatttggaatgtcctgacttattttgggctttgagtcagaaaaatgattcgtaaggccagctccacctcttctatctcaaaagctcggaagagatctatggtatttggccaaatgctagctataattgcctttctgtggtttgacgtcaattaatgactggactttgtacccgaaagacagttaaaacgaaaggtagccaggaagggaaatcatttcctcctcagattaccaagcaagaacagctaaaatgaaagccatcattcatcttactcttcttgctctcctttctgtaaacacaggtaaggaatatttttacattttaattcttccaatcatgtatgttgtctttgaggtagaatcagcaggcctatagctaccaattctcccagcccagcacatggtctattttataaatgaagtttcctctccagctcagctcaaagacacagacattttatcctgtgatggggaagatagagcaatagcaaaagtggtctgtgggctgggcgcggtggctcacgcctgtaatctcagcaatatgggaggccgaggcagatggatcacttgaggtcaggagtttgaaaccaccctggccaacatggtgaaactccatctctactaaaaatacaaaaaaattagccaggtgtggcggtgggcacctgtagtctcagctactcaggaggctgaggcagaaagaatcgcttgaactcgggaagtggaggttgcagtgagctgagatgacacggagtgacagagcgagactccatcttgtaggggtggggggaagaagtggtctatggagtgagatctgggggctcagcaaaccagaggtttctctttgagagttcctgaggccagataagaaggactaagtaggttgcaaggacccagttctctactatagcgttctggatcccctctcatgataatcagagagctgaccacagcaaaaagcctcctttcacaaatgtacttgaatttgagaatgctaaaccatagggagtaattgtcacgttgattagacttcagacatgtactctctgttctgagttaggaagggttctatgggccacatgtgggtgaggtcagcagtatgttgagaggtgagggttgtggaggccaattggcttcctaaaattttgcagaaaaatcactggcatgaagtagatggactaataggaaaaaaggcatacaactgtatttaatgtgtgtacccaggaaccttcagcatgaacacccaacttcctgatgaggtatagaagcttatacaccatcttgaggttacagaaagaaagggggcttggatcttggtaaaacaagttatggaagaagggagaagaggaattctgttgaggggcaataaatgattattagggagaataattggatctgggaacaaaaatgaacttgtagataattctccttggaatttaaagatccttggagacagtccttatcttgatgaagggtcagctcaggggtggtttccttctcggtcttctttcctgtagtggataatgacataacagggaggggaacaggagcaatagttcttctttggtggatcagtccttacagcgcttgttgacctctaagagtttttaatttaaaatactcattatatcatggagctatatttgggggtgaaatatttttatttccttcaggttcaatgagttgaaatctagaagctgcttgcagaaaggaagaaagtatttgataaggcagatgtatgaagagaaattaagccctttcagagaactggaatgaatggcatcaggattagagttttttgagagctggtttcaagctcttaatgctggaaggttggagaaggctagctgcacaggaggggagggctcaccagatctctcctgccaaccttgggggcagatgctaggtccaagccttcaggacaaaggaagaattggtgaggcttgtatgactttcaggagccactgttaaaaaaggcttgactttttaaaaatagaatagaagggcggtagaaaggggaaagttggctgggaggggacaaggagatgaatagagagttaagggaatcaggaatcattgaggctcaagggaccttaggggaatggagatgtttcttgacccagagaacccagggggaagggcaaaagtagggcaagcagggattcagatggcatgccaccacttattagctgtggggtgtctctgaccctcagtgtcttcctgtgtagcaatagaggggaaatccctatactgaagagtgactgagaggattaaatgagacaaagagcctgatgtgccgggatactgcctggcacataggggcttaataaatgatttccctttttgtcatgtctgcacttggatctgattttcttttctttctttctttttttttttttgagaccgagtttcactcttgtcgcccaggctggagtgcaatggcacgatctctgcttactgcaacctccgcctcccaggttcaagcgattctcctgcctcagcctccagactagctgggattacaggcacctgccaccacacctggctaatttttgtatttttagtagagatggggtttcaccatgttggctaggctggtctcagactcttgacctcaggagatccacctgccttggcctcccaaagtgctgggattacaggcgtgagccaccacgcccagcctggatctgattttcaaactttggttttgatttcctcttctttgtttaaaaaagttatacaagtaatgcagacccactgtaacaaatccaaacaatacagatgtatatgaaataaaaattgagcatccaatctgacttcccacccatctacctccagatatattaatactgacagttttgtggctactaaggtttgcttttgaaaaaaatatttattttattatttatttatttattttgagacagagttttgttcttgttgcccaggctggagtgcaatggcgccatcttggctcactgcaacctccgcctgccaggttcaagcaattctcctgcctcagcttcccaagtagctgggattacaggtgctcactaccacacctggctaatttttttgtatttttagtagagacggggtttcactacattggccaggctgttctcgaactcctgacctcatgatccgcccgccttggcctcccaaagttctgggattacaggcgtgagccaccgcgcctggccttatattactttttgagatggagttttgctcttgtcgcccaggctggagtgcaatggcactatctcagctcactgcaacctctgcctcccaggttcaagtgattctcctgcctcagtttcccgagtggctgggattataggtgcctgccaccacgcccagctaatttttgcatttttggtagagatggcgtttcatcatgttggccaggctgatcccaaactcctgacctcaggtgatctgcccgcctcggcctcccaaactgctgggattacaggcatgagccaccgcgcctggcctgaaaatttttaaaaagttgcttttttttttttttgagacagagtctcgctctgttgccaggctggagtgcagttgtcacgatcttggctcgctgcaacctctgcctcctgggttcaaccaattctcctgtctcagcctcccaagtagttgggactacaggcgtgtgccaccatgcccagataatttttgtatttttagtagagacagggtttcatcatgttggccaggatggtcacaatctcttgatctcatgatccacccacctcagcctcccgaagtgccgggattacagacatgagccaccgctcctggcctgaaaatttttaaaaagttgctttttaatgtaacgttaaggattttggaggtgtgtgtaaggaatcactacttcaaacatgagttccatctcagattctgagcaaccaagggcaggaagtgtgtcttgtacacctttacgttcctcctcacccctatgccttgtatagcaccttgactgcaagaacccccgcacaagcatttactgaaacaaatgaaaaatgtgccagtgacatttgaagagcctttaacaggcaaaacttcccaggttgtttttgctttctctgagagactaggactgcattattccacagaatctgatgagtgcctttgggaaccaacatctcatcataatgaagaattcagatctgggagaaaggcgtttgattgtgactttcagctagctttgaataaagcagttataggtgtgccctggacaggggtggtgattatggagtgttccccagaaagaaaccaggtcagggcatatattttcccattgaaacctatgatttgtacctctgtggacgttgtgctatccttgtgttatttagaagctttaggacctaaggaaataaaaagactaaagttatttctactgcacagatgtcttcatatatttctgttatctatagattgaacaaaataggttattttacagttcctcttgggtatttttactagataatttaagcctgggatatcagctctaagctgtcttccctgaaatctatacaaccctcagataaaacacatatatacacatagacacacacaagtgtattttagtttaaaaaaaaatcgtagctattcacagcaatgaattgctgtcagcttggaatgtgtctcatttattaaaactaattgagcattctgaaatgtattctccctagtgaacagaaatttaaaaccaaaataaacaagccaccaagtccaaaactccttgtcataattccaaagacctgcaaaaacctctcaagaagtcccaatttgttttatgcacatctacagaaacatgttggttctttggcatcggccgagaatgaatattcccaaagcatgaaattcagggtctggtggggttggggttgtttgcacccacagtctgccaagtccttttcttctgtccagagttttccacagcgagagccagcccctggccactctcactgctactccgatgatagagggcaccgtggaggtcacttctatttccaccgctttcattctgatccccaattttctctatttgcttttcttgtgtttgttcctcgggggtcttggctttttcattaaatggatggccttccccataactttaatcaagtgatagttaggacattgtcatctcacagacctggctttgcctctgggcaaattccttaacccttctgagtattggtgggctcttctgtcaaatgtgggcacttatgtctacttcacaggtacagtcgggcacagggccagtgcttgatagatgagaactatcctgagtggcaggaataggaagactggcagtcaacattgccagttgctgatgtatttcttacctaggaagagcaattgctgatctcttcaacacttctgaatggctatgttagccaagccctcttcaaggtgaagaatcaggctctgccctcaaggggctcatagacccatcggggaatcaggaagcatattctgcagttctctgcaccctaaggtttagaaattgcttcctcactaaacctttttctttcaataatttttttaacctattgtcaaggtcagagttcttagagacaaggaaaagttctagaaaacttatcactgggccaggcaaggtggcttacacctgttatcctaacacttgggcggccaaggtgggaggatcacttgagcccaggagtttcagcgctgcagtgagctattatggcaccactgcactccagcatgtgtgacagaacaagaccatgtctctaaaaaaaaaaaataaaataaaagagtgggggaagaaaatggatcactggatccctagagtttactactccatgtgtccaggggttcctaaaagttgtgaaaatgcgactttgatatccatcatagctcagagggcaaagatcacttattcatcttactcttagtcaatgtatctagaattgtgaatgggaaaacactactagaataaaattttggaagaagtataataagcacttaatgaggtatttttattttattattctttaaattacccaaccctaacctttccctccctcaatctatcaaggtaatgaaaaaatgggacagttgccttaaagtgcagaaagacaaaagtagtccatttctgggtagtcactgcgccaccttgtggcattctcaattgtcctcactgagaatggtctgaagtatattaaaccctgatctacagttacgtgactacaggcataaataatattacttcttagtattcaacttaaaaaacattaactcttctgcgggactggtgggtcacatctgcaatcccagcactttgggaggctgaggcaggaggatcatttgaggccaggagttaagagaccagcctagccagcatagtgagaccctcatctctaaaacacacaaaaaaattagccagccatggaggtgttacaactgtagtcctagctatttgggaggctgaggtgggaggattgcttgagcctaggagctcaaggctgcagtgaactatgatcacactactgcactccagcctgggtggcagagcaagaccttattcctaaaataaataaataaacattaactctttatttgtcacatttttcaataacattttttccagttttgtctgtttaatttttaatgttatttattgtgggttttttgtgtttagaaataaccatgtattttaatttttaatgtagtcatatattttcatttttccagaaaagaatgagttgaggctgggcatggcacttcatacctataatctcagcactttgggaggccaaggagggtggactgcttgagcccaggggtttatgaccaatctaggcaacttggggaaaccctacctctaaaaaaaaaaaaaaaagaatgagttggatatgatttagtattaagtaactgccattagttattcaatgtactgtctcctcaaacttggtatctttgttcctccagccaccaaccaaggcaactcagctgatgctgtaacaaccacagaaactgcgactagtggtcctacagtagctgcagctgataccactgaaactaatttccctgaaactgctagcaccacagcaaatacacctttcccaacagctacttcacctgctccccccataattagtacacatagttcctccacaattcctacacctgctccccccataattagtacacatagttcctccacaattcctatacctactgctgcagacagtgagtcaaccacaaatgtaaattcattagctacctctgacataatcaccgcttcatctccaaatgatggattaatcacaatggttccttctgaaacacaaagtaacaatgaaatgtcccccaccacagaagacaatcaatcatcagggcctcccactggcaccgctttattggagaccagcaccctaaacagcacaggtaaggacaattccctcaaagactccccaaggatggagagtacaattgtggagggagggaggtgggtatgttctggtggggtaggaaaatgggtctaaagaggcccaaggtttctttggaaatgaactgtgggcttgaaatctgtgtcacaatgtagtgacagcagaggccctaaaatcctcagtttccttctgttctcctttccttccctcccatcctacctcaagttatttgctagctgtgcagtattttttttaatgaacttgggctttgtgaaaggtagctctatagctttcctctccctaggggatttttagaaatagtttcagctgctctgagaagaccaggtccaaataagcacagactgtccagcaccactggtctagctctctggtctacctaaggaagaagtcagttctacccttgtaagatggtggctgatcacaatgtggaacttgagccaagtcatagaatttgagactgaggggtagaaagcaaaacaacagcagtgttcaaacaatcctaggcataaccagggccattgtccaaaggacagatgctttgggaacactaagagatgacaagtgacctcaagcagaagttaatgaaacaggaaccatttgcttcacttccccaagctcagcctataacagaaatcaactacgtttatcagtaaaggctaaatggccttgtgggccatgtggggtctctgttgtaactcctgcactctactattttaacatgaaagcagccacagttaacaaacaaaaggttggtcagatatgactcgtgaaccatagtttgccagcccttgatctagaagaatcgtcacactttagagcctaaagaatctagataaatcctatcattctcagatgggaaatctgggacccagtgagggccatgactcacccagggtcaaagatcaagtggatgtctccctacccttaacttctggtagcttcctcaatgttctttgatagatttaagaaatagatggttaagcaagtagaccccagaggctgtatctaagacctctttccccaatctttcatgtttggaggggccactctgaaggcgggatccaatgggacacagctgtcctgggatcaggaaagagaggttttctaagccatttctgcttcgccaggtgttccctcagagtcaggccatcttcctgtgttctggccctaccatgaacaaactgtggggcatggggcaagtcatttctctcttggcttcaacttagtgatctgcaataaggcgagactgaactaaaaagccccccaaatctcttctggctgtaacatcctgtgacttaatcaattcctggccatgaaacaagttaatgagtctgtccttcgttgctgaagagaaagcacctcagagttgtttgtctggtgtctccagaaggagacacattcttccttaagatttcccaagtcatctttgcaaggtggctgaggcttttcttaaagaagccattaattttatttagaagactggttcatactttgtcagaggggtgacgcttatttttgtttataagatactgaactatgcctccttttatcccatatagtctattttttttctctttaaaaaattgttaatggaagccgagcatggtggctcacgcctgtaatcccagcactttgggaggctgaggtgggtgaattgcttgagctgaggagttcaagaccagcctgggaaacatggcaaaaccccatctctacagaaaaatacaaaaattagccaggtgtggtagcatgcacctgtagtctcagctactcaggaggctgaagtgggagtatcactcaagcctgggaggcagaggttgcagccagccaagattgtgtcagtgcactccaggctgggcaacagagcaaggccctgtctcaaaaatataatgttaatgaactttatttttagagcagttttagactcacagcaagatttagagaaaggtacagaggtttcccatatactccctggcctgacacatatattatcaacatcccccaccagagcagtgtgtttattacaattgataaacctccagtgacacatcattatcacctacagaccatagtttacattagagatcactcgtggtgctgtgcattttatgaatttggacaaataaatgtataatggcatgcatccactattataggatcacaaccctaaatatcttttgcacttttcatcctcccctctaactcctggcaaccacagatctttttactgtctccacagttttgccttttccagaaagtcatatagttggaatcatacattatgtagcctttcgagattggcttcttttacatagtagcatgcatttcctccatgtcttttcatggcttgatagctcattttttagtgctgaataatattccattgtctagatgtaccagtttgtttatccattcacctactgaacggtatcttggttgcttccaagtagtggcactcatgaacaaagctgatattaacatggatgtgcaggcttttgtgtggacataaattttccacacctttggttaaataccaaggagggtgactctcagatcttctcgtaagagtatgtttatttttgtaagaaaccaccaaactttcctctcaaagtggctgtgtcattttgcattcccaccaatgaatgagagttcccattgccccatattctcaccagcattattttactttttattttttaataaaagtaaattaggcctataattatggaaaaaacagctcaaacagggcaaaatcatgtacaataaaaaataaatctccctctcatcctaaacccccaggacccagacccccagtttccttccccagaggcaacttctgtgcccaattccttgtatctccctcctgaaattacctatgcaaatataagcaaatatttgcttgtgtataatccttcccttcttttattcacaaaagagagcatgttatacacattgtaccttacatacagcttttaaagaaatcagtggtttctacatataggtttgtaagactctcaagacagctctgaaggttatcaaacacataagctattctgacatcacagctcagaatcattccacttgacagaagtgaagaaaactcatagcccagatcaccactggaccactgagctaactctcctcctcagatctcatcagttccccagagaaagaaagatgctacaccctgcctggcctgggagtctcagcccacagtgtagaacccattgcagtgttattttcaccatttattcagatgatccacttagaaagccagaggctggaatgtcttctcatggcctcttagaattttcactgagttaatccacatttctctcctttactatcccattcctgtttttatggctatgtctcctaggtatgcctaacagaatgtgacatctagtttcttttggagcttcttggctgtttcttcctatatgacaattattcatacctttctaaaaataagatgttttatctagaatgttttggggagccccacctagtgttagaggaccatgcttcaaggttctggagggactttgagatctgaagattcctgactccttggagtcagaagactgcaatctctctttctttgggcaagcccttgtacactaatctctgatctttactattgacaagtattatacttggctctagaatttcagaaacaaactctctagagacctaagcaagcaaatatttgtttttaactcttccaaaagtgtgctgtggagtaacacaagcaaggaatggaaagggcccaggggggaggcatgaagatggaaaaatacgtttccagttgttatttattgtcatttctctggatttctaatctctttctactccatctaaggtcccagcaatccttgccaagatgatccctgtgcagataattcgttatgtgttaagctgcataatacaagtttttgcctgtgtttagaagggtattactacaactcttctacatgtaagaaaggtgagttacaagggatgagccatggctgagctctgtatctcacaccaaaagtggaatcgaaaactcaaaatgatggcaaaaggagattccaaaatatgagagataaagaaaatgcagaggcaacaaaggccagcaaagtagagaaaagtgctgttacctagggacactgaggcagaacaaggtgatctatcaaagaccacacagtccagcaaccctgggagcctgatcttcagttctgtgtcacaagatttgtttgctccataacatcagatccccctcttagagacataagagcccttcagctctaaaaatggatttcaggagtacatttatacacttgtggcataatgatgttttgattagatcaccagggtgcagtgaaggtctgagggctgactgtctgagttctgttttttttttttttctgttttatgaatgagaaatatcttcattttccagagcagccaattctataagaaatgaatgcattgcattgcccactggggttagggatataccaaaaggcccccaaatgctcatatttttagcactaataatctcactcctggggatttactctaagtaagtgaccccaaatacagaagaacagtttgtgtgtgaagatgttcattgcaactttttcttttccttttaaataattaaaagcactaagtccaataacaaaaaatgattacatcaaggaaggggacatgtacttcacagaatattatgcaacctttaaaaatgatggttatgagaccaggcataggagctcacacctgtaatcccagcactttgggaggccaaggcaggaggatcacttgagcccaggagttcaagcctgcagtgacccagttgtgccactgcactccagcctgggtgatagagcaagaccctatctgtctctctctctcaaaaaaaaaaaaaaaaaaaaagactaggcaacgatttggaaaatacctattatataataagaagaaaaaaaatatggcataaacttggaattacaacaatgtaaactgtaaatggaaagaaatataccaaaattaaaatggttgtgctaggttgggcaggatgatgggtaacttttaaaatatttccagatttcctgtagtgtcgttatataatgttgggaattctaaaaaataatctatgttttaaaacaaaatggaaatgaccctcttttcatcaaatagtacagaaagattctgcttaactttcaggaaaggtattccctgggaagatttcagtgacagtatcagaaacatttgacccagaagagaaacattccatggcctatcaagacttgcatagtgaaattactagcttggtaagtattttccaactttcctttctgtaaagcattctttgttctaacactgagttgcagagtgtagagctggtcttcaggtggttcacgctcgtaccatcgtaccagttgttcaaacagtgaaatgtacctttactggtcggtaaacagcagctgtcctgagcgcctccaccggtgccaccacttcttcattgcccaggcctctcccctgggacccttggaccaccccatggtcttgcacctggaggcgtggcacctggcctggcatggcagagggcctgcagaagctggctccagccataccatacccattgttttataagctattaacacagttttaaatggacagataaatatcatgaagttttaaaataaattatttccacagaatgaaagagaaaaaatttaaagatgttgtttttcttttttatattcaaatttgcataaattttcatactagtctggcttttaaaaaaatgtctagaagaagaattacatctgaatatctgttacttatttttcccattttcaaaaatgttggcatgaacaatagtttcccatcatttagattattgtgagcaagtgcacacatgtgagcaagcatgaaaggaaagggtctttccattctgcagccacagatgttagctctggaaggaccctcagagcatgtccagccaatacagctcaaagttcagttttaaaggaaaaaatattagccttaaatatgtcttagaagttgaggtggaggctgggcatggtggctcatgtccgtaatcctagcactttgggaggatgaggcgggcagattacttgaggtcaggagtttgaaaccagcctagccaacatggtgacaccccatctctactaaaaatacaaaaatttagccaggcgtggtggcaggcgcctgtaatcccagctactcaggaggctgaggcaggagaatctcttgaacccaggaggtggaggttgcagtgacccaagatcatgccactgcactccagcctgggcaacagagtgagactctgcctggagaaaaaaaaaaggaagtagagatggagagacatttttttaaagctgaagtcttattccatgacaatgtctctcaatttgaaattatatcactattagaactggtaacatgtaaaaaatgtatcgtggaaatgattttacagatggtgcaaagagagctagtgcttccgactgcacagccagccagtacgtgacaacgctaggataggatctgtggctgctgtctcacagagtttgctctgtccctttgccatgtcacctctgccctgtgggccagctggcagtgacttgccctctcatcttggatctgctttcaaatgtgccagcacggatgttttcagtacattgaagacagcaacatcaatgtggtcctacttccagggaacccctgaagaacttcatgtggctttactgagcaatggtcacttagcactactttccccaaacttgactttgagtgtgagtgtcacaaaagccccctccagttacaggccttatgccccggtcttcagagatcagattagatacttgatctcagtcagggtttgatgttcctgggggaaccagtgaggggatgaagcattcttatagtttctgggagatttgtaatccagaagggatgcaccagaactcccttgcaaccattagagtagagttaggaaaatagagacaacttactttcttcaaggtcctcttagcagcctttgtgggggcagtcccagctcagaccctaagaagtctcccagggtccattttctacccagttggatcctgttaaaagctagatagagcattatttttttctgcctcatttgatttgtagaaaatgtgaaaaaaaaattttttttacttgttattaaatctgttttcctccacagtttaaagatgtatttggcacatctgtttatggacagactgtaattcttactgtaaggtaagtttgttatggacaattttggaggcagatgtgtgtctgtctaacttccgagcttctcttgaggtctgcatgtaacattaaggccctctgtggcaagtcacaagttaagaggagagggtcagtctcagtctgagcactgcaaaggggactgtgtgccttggccctgcctctgatgtcaccccaactctgggcagggcatggcctggggaaggcaaaattctgtctgtgattggctatgcaacaacttgtgcacatggtccaggacatcatctggatctctttgtttgtcttgatcccatggctgcaaaccatatctagtcaatctctggaatgtgcattccagtgggccggggggagactgaatggcccgtgatcatctcttccctcatatggcaagtgtgagggggacaagaacacccaaatcacactcctggctagagaagggtcagtggtgagctttctgcagtgagaacaagcacttattgagcacttcaatatgtaatggcaagtgctgggtgctatttagggaaacaaagaggcagaagattctcaagaaattagcaattgcatctcagcctcctctggagcacattaatacacacgtacttaggctgaggaaagaatgctctaagacagatgaagttaggtaggaaaagcagccctcgtgtagcaatgcaccatttacatcttaagtcttactattgtatttatccttataagccatatcaaatcctttgtgaaggccagacatggtggctcacatctgtaatcctagcactttgggagactgaaatgggaggatcacttgaggccaggagttcaagaccagcctgagcaacatagtgacattacatctctacaaaaaaaaaaaaaaccattttttttttttttttgagatggaatctcactcctgtcatgcaggctggagtgcattggtgtgatatcagctcactgcaacctccacctcccaggttcaagcgattctccttcctcagcctcccaagtagctgggattatgggtgtgcaccaccacgcccagcctaatttttgtatttttagtagagacggggtttcaccatgttggccaggctggtctcgaactcctgacctcgtgatccacccgcctcggcctcccaaagtgctgggattacaggtgtgagccaccactcccagcctaaataaaaacttttaaaaatctttggtggaataagagagagagagagagtatgtgtataaaatttcagagaggtattttaaaagtgatggatttctagcttggtcttgaatgaagggcaagtctggttggcagtgaagaggcacagttttcatggtgggaggctggcagcaaacagacaggctgggcccaaacacagtggctctgaagctggaggtgtacagcggacagctgctggagggctgtgaattgtttctgggaattaggtttggtttagtggacaatagccagttcatgtgtaggggatgactggatacaaacaggaatggtgaaattggaatggagttagctaagcctgtacttgaatcctggccttggcactttgtccctgagtgaccaggcaggtgttctaacctctcggaacctttgtcactgcctctgtataattgggataatctgatcaacttccctggagccttgtgaggagtaactgagataaaatttggaagattccctgtatgcagtgcctggcacatagttgatttcaacatcatctgtttcctttctagaatatgggaccctgcagtgtgatggacagctggtcccacaaggtcatttgggggatccccaaaactgtggcactcctttgattcttaaggagttactaaaagggagccaagggtgtttggaggcaaaccttcacctgtgagctcagaggcatggagggaactacttcccccacctcaggggccagtgcagggcaaatgcacctggggctcacctagaaaggcatttcttaggctccagcccaaaattatctctccactctgactccccaagctctttcagccccaaattgtctctcccctctgactccccaagctctttcctactatagcaatgttggaattggaaggatcctcagaatttctctctttaaaacctctctttggacagaggaagaaactcgggcctggagaagctgactggtctcgggccacaagggtccggacctcctgtcttaactccaagcctagtgccctcgtcatttatactcaagtgtgcagtggctccaatgttccctttaaccgtttcacaggtgtaacgtcttgcctctcctgaattagtgtataaactggtagattcttttaatgaataaattatggatggcatttgctttcctagtcccagtgcaaagctatgccatatatttcaaccaatatagaataatttttatcaagtacacctttctcactgccctattacattccactgccactccctgccgcctcccccgcccccgcccccgccccaccaaatcccatcataaatgaattatggtagaaaatattaaattacaatgctgaagcccattacattttttgggctcccttttgagatgattgtgcctaaaaatggaatttgattcatgttttggatttttcttgattgttctgaggacccaaggtggctgcaaacattgcttaaataggttggctatattttcaggcttctgcatttattcgagagtcaaaatgaaattttagctgggcacggtggcgcgtgcctgtggtcccagctacttgggagactgaggcggcaggataagctgagcccaggaggtctaggctgcagtaagacgtgatctcaccaccgcactccagcctggtgacagagcaagaccctgtctcaaaaaaaaaaaaatgtcaaaaaggtgtatagaaaaaaacatttagacaacaaaaatatatcctgaggcttaaaagcacagagcgacaaatcagatagtgaatgtttttaaaagtcatttttccccctgtttcagtgattgtatcacttgattcattttggacaatgaaataattaaacttggcacagctgtgcttagggctccgaactgcagtgctgattagagagagagagagagagacagtgacaatgtcttgctcatggcaggcacttcatattgctggtaggatttgctcatgtttcccgcagccccggccctctttgtttcagttctcctctgggtcgtgtgtgtccaggcccaatcatgttcccactctgaaactgcctgctgacttcctggtcctttctgggagtgatccaggctctctatggctggttactgctttctccatgcagagggagggacacgcgcccctctgtctctcccaaagaaccagactgagatttaacagctgctgtcctacagaaagtgacaatttcccatttcaggtattacttgttctaattctggttagctctaggctcctagatccttaaaatgtgattcataatttttccaaaaatggttatccacaattttcctaagttttctccaacagaacattgttttcaccataggtttcctctgaatacacatcaaatagagacctccaagcctgtacattgccatctttttgcagcccccggcctccatatgtgggtccgaatcatagggacaggacagcgggtcaggactagggccgggagattcgggagtctgggagattagaattatttgttgattcttcagttcaattcattaagtgacagattcatctcatttttagcacatctctgtcaccaagatctgaaatgcgtgctgatgacaagtttgttaatgtaacaatagtaacaattttggcagaaaccacaagtgacaatgagaagactgtgactgagaaaattaataaagcaattagaagtagctcaagcaactttctaaactatgattgtaagtattgtataattttattcaaagttcacctgaagacctacctaccttttttgtaaaccttttcattatatgtgaaaaggagacaagaactgcatcattgaactgacaactgtctctaaatttctttttatccaattcttcttcccttttcttgttcgcttgccctctgcttctttccaaccatgtcccaagtcatcaaactgaccagtgtgttcctctctacgaaggtataaatgaccagacaaaccactgctgggcagggaaagaaaaaggagaaacaacagggctttatgtcaggttaaagatttccaaatgattacagaaaattttacctgtggctgggtgtggtggctcatgcctgtaatcccaacactttggaaggctgagatgggcggattccttgagcccaggagtttgagaccagcctgggcaacatggcaaaatcccatctctacaaaaaattagccaggtgtggtggtgcaggtctgtggtctcagctacttgggaggctgaggtgggaggattgcataagcccaggaggttgaggctgcagtgagctgagatcacgacaccacactccagcctgagcaatagagcaagaccaagcattacccgtactattttcccctttagacacacacgaacccaccatgtagctgtagcaatttgcgtttgctgtgttacgaaggtagtggccaaaaacaaccatcatttatttactgcaaccctagaattctatgggtctgaatttgagctgggctcaagtggatagtgtgctgatctgggccaggcttaattgatctctgctgggctcacttaagcatctgccattagctgctgggtataaatggtttgtctctgctccacatggtctcttatcagcagacccatccaaaggatttcaagagcagcaagagggtaagattcaatgcacaaatatttctcaagtctctgcttacatcacagttacaactgtccaattggctaaagcaattcgcattaccaagcacagtgtggaagggccctgcccaaggggtacagaaaggtgtgagtaaattgatgtcatgactgcagtcaacccaccataacagtcatcagaagttcctcaccccagaggtgacccactggggccagtcccgggaagaggtgtttgcagctggttctcagtcctggttgccaaatccagaatcctctgttgagccacaacttatttgacttttctatagcatttgacactagtatccttcccttctagatgttcccttcttcctgggcccgcatccaccattctcctaatcgccttcgtgcctccctcatccttctttttgctccttctaagactcctttcttcatctcttaagtgtttgcttttttgtttgttcatttgtttgtcagggtctcacactgttgcccaggctggagtgcagtgggatgatcttggctcaccacaacctccaactcccgggttcaagcgattctcctgcctcagcctctcgagtagctgggattataggcatgtgccaccacgcccagctaatttttgtatttttagtagagacggttttcgccattttggctgggctggtctcgaactcctgacctcaggtgatctgcccgccttggcctcccaaggtgctgggattacaggtgtgagccaccatacctggccggaaaacactttcctgttctccggcttcagtggcaaagataaattgttttctttgcccaaaattgtagaatctcttgctctaggcttttaatcagaggcattttcatgtggcaggtgatgaaggaggctcagttacagtttgggatgtttagtagagaggagccatatgactctacctactcctattctctcccccactccattctcagactcatcatttttttttttctccccgagacggattcttgctctgtcacccagagctggagtgcaatggcacgatctcggctcactgcaacctccgcctcctaggttcaagcaattcccctgcctcagcctcctgagtagctgatattacaggcacatgccaccacacccagcgaatttttgtatttttagcagagatggggtttcaccatgttggtcaggctggtctcaaacttctgacctcgtgatccaccagcctcggcctcccaaagtgctgagattacagacgtgagccaccacacccagcccagactcatcttttaaccctaatgccttccaacccatttttatttctttatttatttttatttatattttgagacaaggtctcactctcgctcaagttggagtgcagtggcatgatcatggctcactgtaaccttgaacttctgggctcaagtgatcctcccactccagtctcctgagtagctgggactacaggagcttgccaccatgcccagctaacttttaaatattttcactgtgttgcccaggctggtcttgaactcctaggctcaaacgatactcctgccttggccttctaaagtgctgggattacagttgtgagccactgcacttggccccaaaacttattaaaaggcaaagtataacagcaatggggtggggtaattttcacaaattaccttatccatattgtcatgctgaatatatttttaaactatttgtgcttctcagtgacccttcggtgtgattattatggctgtaaccagactgcggatgactgcctcaatggtttagcatgcgattgcaaatctgacctgcaaaggcctaacccacagagccctttctgcgttggtaagtgtttcacctgcttctaaatgttcttcataacatcactttctcttcttttgcaacataaaaaattcactcctttagtttccacatgcatttcagagtccgagtgatctgacttctgactttagacatatggaccatggctgggacctttgctagcccatgtccagcttcacagggggcacatcatgtgtggagtcaataagcatctcattttacctagaaaaagcaatgtgaaagacactgtcatgttgtcacatgtgactttggggttaaagagattgtttctgaaaattacccagaaatcattctgttttgaagcttccagtctcaagtgtcctgatgcctgcaacgcacagcacaagcaatgcttaataaagaagagtggtggggcccctgagtgtgcgtgcgtgcccggctaccaggaagatgctaatgggaactgccaaaagtaagaaaaataactttgtttttgtcttgccacagctggagctaggcaaagtagagagaccttacaacacgtatataggtgttgagtcaggaagctggtaagctgtcataggttggtagagacagcatcctcatcattgtcatcatcaatagtttttttttttttttttttttttgagatggagtctcactctgtcccccaggctacagtgcaatggtgcaatctcggctcactgcaacctccaccccccaggttcaagtgattctcctgcctcagcctcccgagtagctgggattacaggtgcctgccaccctgtccagctaatttttgtatttttagtggagacggggtttcatcatcttggccaggctggtcttgaactcctgacctcatgatccacctgcttcggcctcccaaagtgctgggattacaggcgtgagccaccatgcccagcatcatcaatagtttttgagcattctctatgctccaggaaacacactaggtaatacctatcacacagcaacattgtcaggaatgtcttaatttccattttcaggtgaggaaactgaaactgattgtaaataacatcctccagctcacagggcaacaaataagtggcagagccatgtggcgtcacagcctgagatggtcccactaccctccatgcctcttgggttcagctttgcctgaactgcagaatcttcctgaagcccggaggatggagtgttcagtcagtagcaaatgagcctgcatgagattgcgtacccccctcacccttccagaaccccatggaaggtggtctcctggaagaatgagagtgtaaggaaggcaaaagaaagaggaaaaaaagcaagggaggacagaataaaaggaagatggaaaggaagaggtggagattggggtgggaactctgacatgctccccacaggggctctttaacactgtttcctattgctcactgtatttcaggtgtgcatttggctacagtggactcgactgtaaggacagtgagtatgaaagtcttgctattataaacaagttattaaacatctgagaaatcaatagtgaccccattcaacatcctgcccagtccttcaaagtctctgtcctctttcataaagagagagaccatctgcctccagtttgccttctgggtcctgccatgccatgcccacccttaggttatgaacagcagcccctctgccatagaaaataacagaactcagcaccaggagtgggctggcacctctggacttgcttgagaccagagaagggcatcttagcattatgttgatttcctgcattagcttacatatgcattatctgctgctactagagataaaagaccagtaattccaaaaattctggtggttatagaagagcagacctagaaaccagacatttaaatactcaaatccttttgtctcagagctatttactggtttgggatattttgctgcaaattcaaattctgtaccctcccatgccccacccccaccagattaagacaatactaactttaaattttcaattattttatattctaaaatttacataatgaactaaagatcagtcttccaagatgaaggaaatattactgtcagccttcctgccagccatgaagatagtgatgagtgacattctccatttctactgtattttattgcaaggaataatttgctaagtctttcttcagggctttcaatttccacatctataaaatgagaagtttggaccagacaaactttgaggtctttcccagatttgccagtctgtggccccatgaattcacattaaaggcagcatttggggaagccatatagcagaaagagacgaagaggtctagagcagtgttgtgcaatagaaatattatgtgagctacacatttcatttgaaattttagaaatttcaagtaaattgttagaagtaaaaagaaacagatgaggttgattttaagaacatattttatttaatctatatatccaaaatatcatttcaacatggaatcaataaaaaaagataaaccaattctctcacatttttttcacatgaagtgtttgcaatctggtgtgtctgttacattgtgtctcatagccgcagtcaagtgtcaatagtgccaaccagggcagagttaggagaggagaatgggtgataatgaacgtctagactcttccctcattgatgttattatcaagccattagctggctcctctagcagtgacatttaactccaacctagtttccttagcttatcagtaaggtgaggtatggagggcaggcaaaggcagcagaggtaaggagggaggtgtggccctcagctgatactccactccccacaaagtccaggaagaccctgccaccatcctttgtatttacagtgttttgtctggcagggctgccctttccaattgagttctgaagacacagtttaggaggtgtgaggagggaatgctaaaggaaataggccaactacccaacctggcctggagggttggagaccagaacctgatcgtcttcacagctaggagtccctgggaatacacgaacctgtgcagtagacagttgggggccagcttgttggagactgttcttattttcttcttcctttcagaatttcagctgatcctcactattgtgggcaccatcgctggcattgtcattctcagcatgataattgcattgattgtcacagcaaggtatgggatgaaagtgtcctttttaaattttttttttttatagagagatgggggggtctcactatgttgcccatgttggtctcgaactcctgaactcaagccatcctcccaccttggcctcccaaagtgctgggattacaggcatgagccatcacacctgccagaagtggccttttcctgcggcacaggaccaccagcatgacactctctagtttccaaacatactcatcctctcctgggcaagagaagggagataaggagaggcctttctagtaccactgactttttttccttaccttaattgtcttcttattatataggcaatagcaggaccatggaagaaaatcaagaaaatagagaagtgggtaaaggggcggaatttaaaaatcactcacaaaacccaccatgctgaggcaactaacattttgagatataaccttccagatttatttctatcttttaaaataatattatatacataattttgtgtcttttgtgtttttaaaattttggattgaggttttttttggtttaacaccgtaagatgacatagcaaccatttccttatgtcattaaaaactctttgttaatgtaataatatttaactccactgaagttgtcaaatacaattttcatcaggtcacttccctgtccaggactctgctgcaaatggtctaaaatcaacctcaactgaaccccctgggttgttgtttttttttaactttttttaagaaagtttatcacgttagccgggcatggtggtggcacccctgtaatcctgctactcaggaggctgaggcaggagaattccttgaactgggaggcagaggttgcagtgagccaagattaccccactgcactccagcctgggtgacagagcaagaccctgtctcacatacacacacacacacacacacacacacacacacgcaagcacacacgtgtcatctctgcatggctattagcttggtgccttaaggtctcttctcttaaggaaggggcactagagttcattcattcaacaaatatttagatagactaaagtccccccattaacagggaggcaaatgctgtgatctttttcccattctcaatgtgccaagtggggatccactttgattttttaaagctactgttttctaacatttagttcatatcttatattttggcaaaataggtagttttccactataatgtgacaggataaacagattttaggttcctacaatattttgttcttgttttttctctttttttttttgagacagagtcttggtctgtcgcccaggctggagtgcagtggcatgatcttggctcgctgcaacctccacctcccaggttcaagcgattctcccgcctcggcctcccgagtagctgggactagaggcacatgccactgtgcctggttaatttttgtatttttagtggagacgaggtttcaccatgttagccaggctggtctcgaactcctggcctcaagtgatctgcccaccacggcctcccagagtgctgggattacagaggtgagccaccaagcccagcctcgtttcaagtctttgaacttgttttactcattttacccaccaacgtgattcttagatgttgactttgctgaatgaaatgctgtatctcaaattattttctaatattatgagcaaaatatgaatgaggccagtggaattagattgttatgttggatcagcattgaagtccaggttttgtcgctacacagagctcatgaccttaaacttaggaaacctacactgaataaaataatgaagtgctttatttcattatttgtggggcatcaagtctgcaacttattctttcataaaactgttagtgttctttggttatgcaacttattcttaattggttcagaaatgttaataattagggaatctgggtgataagtgtgtgagaacgccgtaatatatgtattttgtaacttacaaataaatgtgagattatttcagaatttaaaaatatttttaaaaagaacattaacatttacttcaagaaactttctgccattgtcaaatcctaattcctcttactgattacagatcaaataacaaaacgaagcatattgaagaagagaacttgattgacgaagactttcaaaatctaaaactgcggtcgacaggcttcaccaatcttggagcagaagggagcgtctttcctaaggtcaggataacggcctccagagacagccagatgcaaaatccctattcaagacacagcagcatgccccgccctgactattaggtgagtcagtgggctttttctcctgcttttgggagtgaatgcaccagggcagagcagagacctggttgctgaatcttcaatccttggctgccccgcaggctttctttttctttttcttaattgaaagagagagagagagagagatcaaaaaggaagttccctgctgtcgtaactctgagcatctatgtgactacagacacatcacttaatttccctggcctttgattttctcatctgtaaaaaggtcagcttaatttagatacccctaaggtccctttagattaccaactccatgaatacgactccagagattatgatgatgacacttctcaggctgtttgaagacctaggtcctcagccaggaccagggaaggacactggatgtaaacatagttctgtgggatccttttcaccaggctgtgtaaaggcaacgctctctttccctgccgcttgatctcaaggcaactctctctctctctctctctctctatatatatatataagttctatttgttgttgttgttgttttgagacagggtctcactctgtcacccagacttgagtccagtggtacgatcttggctcactgtagcctcaacctcctgggcttaagtgatcctcctacctcagcctcccaagtagctgggactacaggcacatgccgctatgcctggctaattttggtattttttgtagagacaggggtttctgccatgttgcccaggctggtctcaaattcctaagctcaagtgatcctctcgcctcgtccttccaaagtgctgggattacaggcatgagccactgaactgggcatcagtccacttctaaagagatgaaatggaacttagcttgttggctcatcccatactcctagcactttgggagcctgaagcaggagaattgcttgagcccaagagttcgagaccagcctgggcaaataatgagaccccatttttacaaaaaataataataataaaagatagctttttaaaaaaggagataaagctagttaggctggtgatactgtatttctctagggagaactttcaaggacaacagcttgtacccactgggtttgtattggataatcatagctgtcactgcttagtgtgattgaatgaaatgttgaaagaaggaagcctgtaagagactttaggaggaagagtgacaggagacagatggaaagaaggaagatggtaaaggaagaggagaaagggagctgggaaagagatggggaatggaagagacgtgagagaaatgatagggagaatatgggataaagctgaagaagacaaataatgttaatgaaagtaatgttaataatttacagatctaaacgatctcatatgtttctgttggagtattttctaagagtattgtctctccctctctctttctgtctagaatcataagaatgtggaacccgccatggcccccaaccaatgtacaagctattatttagagtgtttagaaagactgatggagaagtgagcaccagtaaagatctggcctccggggtttttcttccatctgacatctgccagcctctctgaatggaagttgtgaatgtttgcaacgaatccagctcacttgctaaataagaatctatgacattaaatgtagtagatgctattagcgcttgtcagagaggtggttttcttcaatcagtacaaagtactgagacaatggttagggttgttttcttaattcttttcctggtagggcaacaagaaccatttccaatctagaggaaagctccccagcattgcttgctcctgggcaaacattgctcttgagttaagtgacctaattcccctgggagacatacgcatcaactgtggaggtccgaggggatgagaagggatacccaccatctttcaagggtcacaagctcactctctgacaagtcagaatagggacactgcttctatccctccaatggagagattctggcaacctttgaacagcccagagcttgcaacctagcctcacccaagaagactggaaagagacatatctctcagctttttcaggaggcgtgcctgggaatccaggaactttttgatgctaattagaaggcctggactaaaaatgtccactatggggtgcactctacagtttttgaaatgctaggaggcagaaggggcagagagtaaaaaacatgacctggtagaaggaagagaggcaaaggaaactgggtggggaggatcaattagagaggaggcacctgggatccaccttcttccttaggtcccctcctccatcagcaaaggagcacttctctaatcatgccctcccgaagactggctgggagaaggtttaaaaacaaaaaatccaggagtaagagccttaggtcagtttgaaattggagacaaactgtctggcaaagggtgcgagagggagcttgtgctcaggagtccagccgtccagcctcggggtgtaggtttctgaggtgtgccattggggcctcagccttctctggtgacagaggctcagctgtggccaccaacacacaaccacacacacacaaccacacacacaaatgggggcaaccacatccagtacaagcttttacaaatgttattagtgtccttttttatttctaatgccttgtcctcttaaaagttattttatttgttattattatttgttcttgactgttaattgtgaatggtaatgcaataaagtgcctttgttagatggtg

SEQ ID NO: 698 - DNA, 5678 bp, Homo sapiens
gtgaggcgcgtgttcgggctcttgccgtccccgcacccgcaccgcggttactggcttgcggtccgccgttcgacaaccagcccttgggtccccgcccgccacggacatgccgcgcgtctacataggacgcctgagctacaacgtccgggagaaggacatccagcgctttttcagtggctatggccgcctcctcgaagtagacctcaaaaatgggtgagtcgggcctgggcgcccgcgcccagcgtcccaggcctggtggcggcgggaactctccaaggaaagaagcggccaaggccgcggcgccgcgtggcagggcctcaaagatggcgacggcgcggcgtcgcgggggcgcgcggtggggtacgggcgcgcgcacgtgcgcgtcctggctaacgactcccccgcggttgtccggccctcgcaccgcccctaggtacggcttcgtggagttcgaggactcccgcgacgccgacgacgccgtttacgagctgaacggcaaggagctctgcggcgagcgcgtgatcgtagagcacgcccggggcccgcgtcgcgatcgcgacggctacagctacggaagccgcagtgagtcccacccccgcgcgctccgcgcccttggggaccctgggggcgggggtgggtggggtggggcctcccagcccgggcaggcgcgagggccgggggtcgtttgacttgggtgtccccgagccccgctgccttcacgtctgcccggggcagccatgggacgccggagcgcggggattgggtttgggtgtttggttttgtttatttgccaagttgggaggtgggtggcttcttctggccccttgtcagcactgtcacgggttcttcccacagaggaagtaaggggtggctgtatttgttgtattctccttacttacctatcagtgcattagttagaggttcgggggcaggctcgggtggaggtggggtagggggcgcgggggacggggaaggggaggagcataaagtataggtcttaaagctatggaacttgatgggggccaaagaatgtactatttttaagtaatgtggtattgtaccacaaagtagatctaaataagctttatgctgtatttgaactaattggggcatgttattgggaggaggttggggggatttttggttatgttaaatgtttgatgtttaaattgttgcatgttgaattcaaactttttaacaagtccttgatgtttcaatttgaaagtgaccaatggggctgaggctgtgtccactgaggctaagatgactgcctttcctgattggccttggcttttccatacattgtgtgacccttgccctatgaccctttggctgaccttaccggaagccatgacgacagcagccttttgccattagacgcagggtgatggtgaggattccaagggttagacaaaactggttaatctgaactaggtgactgttaccttgcgtgttttgtggccaaaccaccaccaaaaacctcacactgtgatgtaagtacttagtgtaaaactagtaaacatttttgtaaaatgtagaaatgcatgtaatcagttaagttttatattttacaatgttctgtaaaataaaacttagcgaggtaaatcgaataaaggagcagtcactctctaacagattgtaggagaggtttagttggatttagtctatttgacttgcccttaatttaattttatggcaaatcacaaatgtgtcgaaggtttagcaatataatagcaaagtcctactccagtaaataaaagttgatatgtttgtactaactttcaaagacattatgcgtttttatcattacaaggcatctaattgttcccttcatgtgataaaggtggtggaggtggatacagcagtcggagaacatctggcagagacaaatacggaccacctgttcgtacagaatacaggcttattgtagaaaatctttctagtcggtgcagttggcaagatttaaaggtatgttttgtaattcaagatagaaatgatatgactaatgctttaaagtaaactccttttatattcttatttctgggaatttattatggtatatagatgttttaagatttccgagtctgaccaatcttgtctttcaggattttatgcgacaagcaggtgaagtaacctatgcggatgcccacaaggaacgaacaaatgagggtgtaattgagtttcgctcctactctgacatgaagcgtgctttggacaaactggatggcacagaaataaatggcagaaatattaggcttattgaagataagccacgcacaagccataggcgatcttactctggaagcagatccaggtaacttgttgaaggacactgtgggaaggaaacaatatttgccaataaaaagggagtaattgagtgatgtcaattgttgcctacttgaattaaagccagcttttagtttgttttggctgtgcatcattgcgttcttttctggatgttttgaacagtgtatttaatttcgtagtaaagaaaaacattattctttggcttatctatttttgccagatggcacggatgtatttaagttggattgggattaagacttcattgtttttctcctaataggtctcgatctagaagacggtcacgaagtaggagtcgcaggagcagccgcagtagatctcgaagtatctcaaaaagtcgctcccggtaaataacgttgtgttgagtcactgtgaatattaccgtacttgtttatggagtatgtgtacattctcactaagtattgagaaaatcggtctttccttgtccagttccaggtcgcggagcaaaggtcgatcacgttctcgatcaaaaggcaggaaatctagatcaaagagcaaatctaagcccaagtctgatcggggctcccattcacattctcgaagcagatctaaggatgagtatgagaaatctcgaagcaggtctcggtcccgatcccctaaagaaaatggaaagggtgatataaagtcaaaatccagatcaaggagccagtcccgttccaattcgccgctacctgttccaccctcaaaggcccgttctgtgtcccctccaccaaaaagagctacttcaagatcccgttctagatctcgctcaaagtcaagatcaaggtccaggtcgagttccagagattaactcagaactccttgtttgcacattattatggaacactttcctacttaggcagttactcttccatgtttatacttggcctcttctgcaagaggaatctcttgaaaacaggggcacacagaaatttgatttgtggccaaattggatgaaaaagatgaggctctaaggaaatggtggcatgaagaccctctcccttctttgtagaattaagataactttgattttatagcttttgagctaacgtaacttttgtaaagattaagctcatttagtgttgtttttttttttttttttttttttttttttttttttttagtatttcagcaggatctgctggcagggtttttttgttttatttgtttgcttatttttaaattaactgttttgagctttgaatacttaaggctttagagggagaacccaattttcaattatgttggctttttataaagcttgagttatgtaagatttaaataaaagtttgctaccaagatgattgccttattgaataggtcactattaaattcctttaaatgttgatatctgccatttgtggaaacaacgtaaattctacttaagtgtaaacaaggcaagcctcagaccagcaataaattactcagtttggataacattattttgtgcagttaatcaaatttgccaaagtctttatctgcccctttaacaagttgagtaaaaataaaaggtattttttagtcaatgtgttccatgattttgcttaaattaatacttttaagtaatggaacttttttcaaaggcaaatttaaactatttaagaaatagctcctaatacttgggatcttgtttagagaatccactttctggaagttctcagcataattagtgttgagagtggttcagttgtctttaatgtttgtcatgtggaaatggaagtagcctctttttgttctgaaattgagtttattcaaagtgtaaaagcacatactgcattttctgctgaaagatcattatgtttaacaggcacttaatctcagtaaagtcagttgccagttaagttccacccagtagtcagtcccctttgtagttagtgggattatttgataattggttagatcatacttgtaaattttaatgctttgtgtaattggtttgaaaaacagtgaaatgggtaaacgcaaaacttttgtactttattacgagtaaagtgtaatgagtactgtggaaaccaaatttgaatactgcaaatttgtaggagttactaggttagcaattagtccatacatccataagcctgatgagttgaaattgcagtttgagaagtgaattaaccttacatccctttgttcagataccttaaaagttactttatttaaaagcatttattaatcttagtctgaaatcaaaatatagattaattggctcagctttaatacctttctaggaggtgtcacaatgtagggtaccaagggttggattgtgatggggcatggtcgtacactgctcattgtgccacaggtgtgactggaaagcatgatattctagggttggtttgtagattcaaataatccagaaatatacctaataagattgagtgaaaaatttgagtcaaatatctagggcattcacagagtagctgtgagttcttggtaatgtgaaaaaggccttgtttttcagaaattcctgggtttcctgttaaaaaatcttaaagcccaaccttaggaatatagtgccccaaaaggcggatgcttcttccattatcttattttctttgatactttatttaattagatgtttataaagaaatgggtttatttttccagcataaacctcagaatttaaggaaagaaaatgatgtctgttgttatagttcattgttttgcctactcagcagaagtgatgactcttaaaaattggctttgaccaaagttctcttgttttcagggaaagaacataaaagctttttgaactacagcctttttaaaagagggatgggaggatattacagtaagaaattaggctttctaaaagtatgaaacatccttcaactgggctctcttgttaataggacatcatatggtaatagactggtttgactatattgttagctgccacagtaagcaggtcattgtataggtaaatgcctgcacccataattttctagtaatagccacgaccaatttattaacagtcagggcctatccttgcctgtagttctcagtcactggatgcacaaaatcactgtgtaacattggctcacttggtgagcatagggttgactgataaaatgtttaattcccttgctagcttgtgagaagaatgagttgatgacatgctccataccagtggctagatggagtattaaggtggagcagaaaagaagtgagaacatcttgattcccctttcttttacttgatggtgtttatgaacatgccgtagtgcctttatggccagtttgagtcctgcctactttgacttttacgttcccattcctgtgttaccaccttcctcccgatttgttcacctattttgtgctttaaatctcaataaaatacttactgagggaaa

SEQ ID NO: 699 - DNA, 90602 bp, Homo sapiens
cgggtatcaaaagaaggatcggctccgcccccgggctccccgggggagttgatagaagggtccttcccaccctttgccgtccccactcctgtgcctacgacccaggagcgtgtcagccaaagcatggagaatcaagagaaggcgagtatcgcgggccacatgttcgacgtagtcgtgatcggaggtggcatttcaggtcagtgtggaccgtagcggtggcctgggggaccctggccagtgaggggtaggggaacctacagtagctcttgtggtgtttgggggtctctcatgcatgcgagagtgtagtgtagccatggcttggccccatatcctgcgaggtaggagtgggggttgtgccagttttgctggtggtgtgactgggggaggcagacacaataattttactactactactattaaatactaatatttaattagctcttgctgtgcagttgtatttagcactttacgtggattttctcagtcctcaacagtcctgtgaggtgggaactaaattcatccccgttttgcaaaaccaagaaactgaggtctggggagtttcaataactctcttgaggtcgaatcacctagcttgtaagtggctgaacgattttctcccatttaagacctgcagtactaattcctgaggtggctgctttgcctcactgatttcatatcctttgccctaaacagaacatcaggatacagatttctgtagtattgagggagcagtagtgttattccagtcctgctcttctctattttccgtagaaaatttagtaggtgaagaggaaggaggtagactcctttaagaaaaggttaaaaaaaaaaagaggagaagagggggtgagctcttaaactattcctgtgtgtgtgtgtgtgtgtgtgtgtgtgtgtgtgtgtatgaactgtgtttatatatatatatgaactgtgtttatatatatatatgaactgtgtttatatatatatatgaactgtgtttatatatatatatgaactgtgtttatatatatatatgaactgtgtttatatatatatatatgaactgtgtttatatatatatatatatgaactgtgtgtgtgtatatatatatatgaacttgcaggaaggtgtaggacatttattgtccaaagagaatccctttatgaagcaggggctgagtgccctgttgtatcctccttcctcctttcactaagagctcccaccacctgaatcttgtcttctgatgagccagttggtgggccagggtgcccctggtcctggcttggatttgtggctaaccaagtgagtggtgcatgaggctttccaatatcttcctggaagcctcatcatgattgatatattgtcgcctatgttgccatcattggtaaaatgtttgaaaattaggaattttgttgcctttcatccctggctagaataccacactgacctatcctccccctactaggtgttaataatttctgagttatccctgcaggatctgattcagaaagagaaagctgatgggagggagtaagtagagtggccccacagtagccatttttatatataaatctttcgaggagactctgaacatgctacaaattaatgttgggtagagatagctttatctgaacccaacattgtttatcctgaacaggccaagagaagagattggcatgaactgttgctttgccagttccagccagtaccagcaaaaacatacatgtatgttggagcatcagaggaaagcagctcctggtggagagtaagaaaaaggagtatttcagcttgtttctctttatttatttatgtatttatttattcattcaaaaaacacttgttgagtacctgcaatgaagtggactgctgtttcccaaaatctggtcccactaggcaagcctcctaaaagcaatatggttgtagatcactggaaaataaatatgatgacaatgtgttatatacattgactaggggttctgggtcctctcccatctccataccatctgtattctgcaattcagagttctttctgggattttattcttagtctttttcttgttcagtctccagaattccttaaggagcgcggtttttttatttttcctctgcctgattacctgctcttcctccctttctatactttatgctccatacttggtcattagcagaggtgaaattaccatgtagctgataaactttatgctttatggccttataactgtaggttgcttctggttctcattctaaataaataaccagtttcatactcagtcctgtatttgcaattttgctttcttatttcttagagaggatacccaagttatatataagttgtaggtcccacaaaacctgaatctgtccatagtcactcttaattattaatttatttccatttgggggaagtagagggcatttcttgcacagtagttcacacctctattccagaggccagcttcagtgacactggaaaaagcacttgacttcctctaatgccatctccatcagtcagatctgagtgattttaatactcaaactgaccagaaacattgctttctatctgtggtaccttcccagatggttcacagctaaaatgaaagtagttgcaagtgtggctcgtgttagatcctggacataaactgagtgtttcatgagcgggtgagaagcatcacttcccaagcattcttgtgaattcagaaacataccatttttgtgtgtgcttggcagtatcccatgaattacttaatagtccctgtggcagttttatatgcctttggatgttctttataacttttattaggacttgtacactttgataggttacccacacattcataatacatcaccaatccatagcatcagcagtgttatttctattatatagcacccagaagagtacatattctaagtgacattactcaaaattgatccatattagcaacattttttaaataactctctacacagagaatagcagcatctggatgtatctccttttttgtcattataaaacataaaatagactatgtcttacaaccacaaactctttttatctgcctaaccaccaattaaataattatatatagtatgttaatagttgagaggggaaataaccctgctgatttgttggtctagtggtatctttaaaatgctctggtccttaaccatcattcatcatctatcacccattcctttttgaaactcctttcatgttttcagcgatgctattggatcctgaatttttatcccatactgattgctgcttttccatccctttcattgtgctcatattcttgcaaacatctggttttgaaaggtttcactgttcatcactttggggctcttggtactctctccctctctttctcattctaggacttcagctgtcccttatctatagaaaactctcaagtctctgatttgaatcctcttccttccctgaactcctgtcccatagcttatctgctcctgggtatttcacgattgaacacttcaggttcaacatgtaccatagctactgtgctagccaatccagcttcttttcctcagttccttgactctgttcttagcaccaccatcccttctataatttttgacataatcttttcttttatcttctgcacccttttagcagatccttctcactcttctttggggctatctctcttctcctttctctatgatgacctccctccccccatcaccaggacagactcttttttaaaagtattttgtataaatgtaagggatacgactgcaattttgttacatggatagattgcatagtggtgaagtctgggcttttagtgtattcataacgtgaataatgtacgttgtacccattaggtaatttctcatcatcctccttcctcctgccccacacccttccagtcaccaatgtctattattccatacctctatgtctgtgtgtgtacattatttagctcccacttataagtgagaacatatggtattggactttctatttctgagttgtttcacttaagataatggtctccagttccatcaatgttgttgcaaaagctcttgacccctgaagctacctggttatgacccccttcccagtggccaccctttacaataatggctctccctttatgtccatcctgcattcagtgttctcccaaacttgatttttcttaaacacttctttcatcaccttgcccctctgctcagggccttcaatggtctcctattagcagcctcccaaacacctccctatcccgccccccatcatgacaagtagcatttcctactattttccaacatggatctgagctttagtctcaccgcctcgtgtcctcaggctacactacgtttatttagtcccttcatgccttttctgtttttatctttcttaacatggaagtgcttttctcttacatttatattctatctatccttcaatgcttggctgaagatcctttccttgatcactctggctcccattgatttttctctcctcttgtagagcttgtaatctgtacttaacaaacaatttacacttattttctatctcttatttcatgatttgattttaaggataatggctcagtcactgaattcagttgttagttcttactcatgagctgccacagatacaataaatgacagaaaactagcggtggaagatttttaaatctgccctcaactgagaatttctgaaatggttctctttagtagagaaaaaaaggaaacaagaaaaaagcccacctccaggggacaatgtatacttccttcatgagtctgtttggaatttgagtctttgggtcaaaggggttttaaaaggcaatctagtccaatcacctaagattttaatcttcttaacagcacctcgctagtgattagagccagatggctgtagctttgaacgcatttaaggataggaaatgctcggtctctcaaagcaactcattacaagtagaggtagctctggctccttgtcttgtttaagcatttcaagaacctctacctatatactaagcagtgactggggatcatggggaaagaaagagatatataatgatgagtaagtagcatccctgtacataaggtacttctatcttctggaagaagtaatcaagtgggtgaataattgacatgaatacagtgagataataattgatatgaatatagtgagataaatatcaatgtggtgagataaatattaatgttttgaatatgaacaaagtgcagggatcttgagagataagtagaattttaacaggtagagataagaggatggaaaaaaagacataccatacaggagagactagaggaacacagatacagtcatgagggtataagccagatatgagcagtgcttaatttcccaatggtgagagttccagggaatgaaaatagttgtttcctatgcctctaggtatgtgatcctggtagctattgagatgagcccagtgtgccacatctacccatgatttttgttcctgtgtgagctgtgaatggttagcgagcgcacagtgaaaatgccttagtcataacactggattgtcctgggtgaataaagtgtttcttcatttttttttattttgcaattaaattccaagtgtcacgtagaaagacctcttcatgtccaaatagtgtttaagcaatagaactcctctctatttttgtccatcagctgagctctgctgaaagaattgagaacactagctgcccagaattcagtgctgtataaaaccagcaggaatgaatttttcttatcttctgagagacagaaaagccattttgcaagagaaataactaatgttcagcattccgatgattgagtccacaacataccacaatttccctttttgctgaaatatatcacctgtaaaaattattctgctaggaccattttaggcattttaacccagaacttggcagcatgtactgtgtggttttgcagtgattaagaaaagcttccatttaagaaatgccacttatttttggtgtcttagttatttaaatactctgaggttcaatgtgggctgagcattaattttttgctgtttaggacacttctctgcccctaatttatattttatttttctaaaaaataaactagggtgtttttacttcataaactttttaaatactaaacaaagaatacaagaattacatttatttgtgttctgattttttttttttgaaatcttcatggttgaaggagcttttggatttatctggcattaaatgggaaattttagcatttagtcaatactaattgatttgaattgttacataatcctcagctattgtgaaaaatgtatttaacaatagatctaggtatagcataattgcatacattacagagaccaataatggagaaaaagaaacatggaacaccattattggtgaatattgggtcacaatctttgtgcagttatggcatagaaatattttaacctatgaaaaatcttgcagtatttgcattcaagtgtactcagaaagactaaggttgtattctagttttatattacatatagggtgcccagccctgtgatttagaaagtgtagacacccgataaatagttgttaaggaatatacttgtatgtaggagatgtatagatttcataatgatagggttttttttttcattgtaattagaacttcaaaaattgaatcaaaacattttctaaatgttgtgagcatttgagacaaattgattgttgggactgtttctcctcctttatcatgacaaatattttatatttttaccagcaatttgtattttccttcaaacaatctatttcttgttatgttgccatctgtcattgtgtattagggaaatttaaagtctttgaactatggttttgtcatccaagaagttggattaagttatatgtgatatatcttctggtatggatttttagtaattagtcaatttcatgaagatccgtctctttagctttctttcttggaccctcctcaacgtttttttcttctatgctttattctgggaagagtttgcattatctgtcatactgacattcttcacaaacttgaatcagggcctgggtctctccacaggtgctcattcacactttccccatggcttctctgagactttgtttaaaacccttttctagttgttgctaggcaaaagtaaacaaagcacactcaataacaatatttaattgattgactaagagtgttaagaacataaaaaacagatgataagatttaagagttgaagtaattatatattaaccatgtccaagggttatagaatggtggcctgtaagagcccaaagggactgaaacagaggctcagaggggtccagggaattaccaaatgccacaaaattcttagctgtttaacttgtccttggatgcgtaaaatactgacttccaggacagtgctctttctgtacctcacctcactggacctgctttgtcagctcatccatagatctgcagtaaaccttattattgctttactttgaacgttgatgctctaaagcatagtgactactgcttaacagtaatttatatattataagatatcacaaggaatgttattgctttctgaacatttaaatttaaaaatatgggacaccctattaaataaaatgactttcatatgacaaatctatttccttgttggaaaggccattcctggtgcatttaggatatgtagagattgttgggatagtttagatcagtgattcttgaccttttggaccaaatgtctcttggaaaatctgatgaaagctattggacgtttcaccaaaaaatgcgtatttttacgcatagatgtttttctcctctgcaccaggccaatgttctggaaacctcttctgcgtcactgtcctaatagtgtaattatttttagctgatactgagacttcacgaaagtggtgaaaaatatttcagaggattcattatatcattagacagttactagtaatgaatttttaaatagaccatgatgaagagtcaaaacattcaggctggacacgaaggcacctacatttgctatattagctctatgataactagagaagtgaaattgacatgttttgaaaagaaagaatttgggagaaaacattggtgaaggaaatggaaggctgtggtggttgagatttcttttagtagttttcaaagattgtttatttaaagtatcattagcccatcgtctattcagtgacttgtgtgaggcatagaatctgtgtaacctctgtgtcacaggggttacagagatgagcctgaaatgctcttcaaagttggttcagaggtccaatgtcagcacagaggagggaggagttaattccacctggaggaagtgacaaggaaaggatttcatggaggaagtcatactcgacagaagtgtcatagattttggataaattctgaaatgtaatgaagatgacctttaaggtgaccgtttccagattaaatgagttagcttggagctgtggcctaagttgaagaccattttcttgcttgtatgtatctgttcattcattcagtaaatatttgtcaattgtgcatcactgtatgccttgagtaaaatttgtggggtttgctctcgcttctctgctttgggcatattgcctcaaaaataaaatgcctcttcgaaaatctgatgaaatctgattgcctcaaaaatgaggcaatatgagttgatatttgactatactttttattgcccttggagtgttcagtccaagagtccaaatgtgcagttatgtaagaattcttttggccagagaccacttcactgaataatagagaattaacaatgtatcatgcagtgtactctgtgcaattcctaggtgatgatgcatatcaaagttgaagaaagatgtcactttcgggaataaagagaaagaactaggcaggtatacaccatagctacactaaaaccttgctccaacatgctcagcttgtgctctgggcattgttcacctaggaccttgcctttgggagtttattatgctatttgaacaatcaatcttatgagagattaaacaagctttcctaaagtgtgttttcaggtatacatttttttaaaaagcagagggtggataaatgctgagttaaatgggtctttttgctgcaggacttctcaggaccatatgccagtgtgcaccaggcatttcccagaaggagaaacagtatatggtgtctcaacttccatgaacattgatacttctccccagagcatctttcttgaggactcatgttccgtaaaacatttagggaactacagcccatcctagtgtgcagagtccaaggacagcaatatggagtgtccctggtgcattttaagtttcaatgaaagattggggcgaataatgaattaaggggtaattgcattccctaacttgggtgagatccttttatctaaagtgaagatgaatgcggaacaataatcaaataaattaggactgtctagacaaccagtctgttgaattcagggcaaattgaagttaattgttagctttcatctgtttattacttgagacagccctatcttttttagcctatcaaggggattagaagatttggcctttcctaaagcagagaattatgtatctgaaaggaagtacaaaatacagataggcataggtatagattagatagatagatagatagatagatagatagatagatagatagataggaatggttttatatatcaagggcaagtttgtgtgtatattgatattctctgttgtcttctgccaaaaagcacaatgctggttcaaagatcagagaatgtgctagcagtatttagaatctgctgacttacttaggcgtaaaggttaaaatgacatgccaccgtatccttgtcaatgtttcttagttgcttgagataaatatattctaggtagcattagaaacttccctgttgccctcatccacataagcatgattttgttttcttagtatgtggttcttctattcattgcaacaagcatttgggcactgcaacgtgcaggctccatcctagggatgcaaagatttgtaacacatttctgttttttcataacacacatatagctcatttatgcatctcaagattaatgcatctaaaacaagacacttgatatttccccataactcttcttcccctggctgtttccaacttaataaatggtacctctatttaaccagttgctcaggttaaaaaccttgaatccattcttggttcctctctttttgtcatacaccacatccattccagcagcaaatcctattggctgtagcctcaaaatatgttctgtatctcacggcttcccacaacaactgcaaccacagttatccccacccaagccgttgtggtcttttgcctttgtccaagccaccatgatctcttggccagagatctgcctctttactagtctctgtacttccttcctcttttgccccactacagtctgctttcctcacagaaaccaggatgatctttaaaaaagttaaaataaggtgaatcactcccctactcataagcctccagtagcccccatcatacttagaccaaaacctagagttttgatgtggtctacaagacactctgtcacttagtctcttcttacttttctagtctcatattctcctcactaatttccttttggctgtgctagccttactggtctttgagcacatcggcctttttcctatcttccccatatacttgcatggctcacttccttacttcattaagatctctgcttttgttctcactcataggtgggaattgatcaatgagaacacttggacacaggaaggggaacatcacataccagggtctgtcatggggtggggggcgggggggatagcattaggagatatacctaatgtaaatgacgagtcaatgggtgcagcacaccaacctggtgcatgtatacatatgtaacaaacctgcacattgtgcacatgtaccctagaacttaaagtatatatataaaaaaagatctctgctttaatgtcacctctcagatgcattcactgatgatcctgtgtaaaagcactccccacttccatggctcactctccccttactctgctttatttatcttcatagcacttaatatttccttaatagttcctaatcacttaatcgtaatatttattcctttatttgtctctctttcccataaaagtgtaagcttcatgaggacttagttatattcacctgtatcacagcacctaggatgatgcccgggactcagtaagagtgcaatattatttgatgggtgaatagatgaaggaatgactttagctaggtttatgatacttgtgaaggggtaagtatatgtacttgcagaaagattccattgttatccatgccttagatgcttctcatgaagacagcccacatttcatatatctgtaggctgtatttgaaacattttaaggggaaaaataatttggggtagcaaaaaattcttaatgtttgtgtgtactagttttctctttgcaaacacagtgatgttctacaggaaacatatatatgcagtacattcaagtgagtgtatattgaaagatgactcttcattccacttcagccccaagcactataacccaaaaataactgctatgatagtttattgtgtatcctttcagatatttactgtgcaagtatgaagtatatacattttttgctattctacaatgggcctatactatatacagggaatctcaactttgcttattttaccttatttatttcaaagaactttcatactttttaatagttgtatagtatttcaaagaatgcctctaccacatccttgtatgtagctcttggagcacataggtaagtttatatgtaagagagcttgctaggattgtaattgctggatcaaagggaggtccatttacagttttgatagctaatgacaacaaggttgaatcactttactttgccaccaacagtgtaagacagaatctgtttttctgcatccatgtcaatactatgttttaactattttcattcttcaacccaataagccaaaatggtaccttatttttatatttctccagttatgagtgagattgaacaatttttcattgaaaggcatttacatttcttctgtaaaagtttatgttcacatttttttaacctattttaaaagcatgtctggtcatttttccttattgacttgtgagaactttttatattttgaagaaatgaactctttgttgaatgttgcaaatattttctttttatggcttctgggttttgtgtcttgcacagaaagcattctttattccaagaatattactttagaaaaatctgccttactttattctagttttttaaggtttttatgttatgcatttaaatcttctgagtttattctgagtaaagagttagagagagattctgctttactttttagatttccccaaatcagatgtctcaacacaatttattgactaaaccaggatttacctactgatttgtataatttaggctatttctagaccatatgctcttatttctctgtctctctaatcttgtaccagcacaactctttctactgtagctttgtcatacattttaatgaaaagttgagctagttataatgctttttcaggaatttcctggcaagctggccatgctatttttccatgtgaactttagaatcaggctttctaatataaagaaaaagttactaatattttaattgagatttcattacatttgtagatttatttggaggaattaaggtctttataatactatttccttttatcaaaaaataaaaactatttttctgttcaaatcttctattgtgtcttttggtgattttgaggatatttttcaggtttatttttcagagctcttgttgagttgatgttgctctaagaagtgagcttatttttttccatcatattccaattcattgtacatagggtagatatttatcttttaatattaattttggctgggcatggttctcacagctgtaatcccagcactttgggagactgaggcgggcggatcatgagatcaggagttcgagaccaacctggccaacatggtaaaaccccgtctctactaaaaatacaaaaaaaaaaaaaaataccctggcgtggtggtgtgcacctgtaatcccagctacttgggaggctgaggcaagagaattacttaaacccagggggcagagattgcagtgagctgagaccgtaccactgcactccagcctgggcaaaagagcaagactccatctcgaaaaaaataataataatttttaaactagacaccttattccttgaattttctttttgtttttctttcattcatttattcattccttctcatcaattttccaggctaagtttccactatccatccactatgataattttctctcttctctaatttttatgcctcgtttcacccttatctaatggcattgattagtacttgcccaataatgttaaataaaattggtaatggtggaatttctaccttgtttctgattttaatgctactgttgtttcaccattaagcatagtgttcaagccaatcactccaaaagctctggaagctctcctaaatcactccaggcaagctggcttaaggacctccatagcaccttttttttacctttattgtaatctggaacacaatgaacttgagaatgtgtttatcttactgaacaatgttgacaaattctgtgtacatcctcaaagaagtacttttccacagatcgccctctgggaaacacagatttagagaaatacatgatcaacaataccaaccatagcataaaggagtttaaggattgagacaaaaccatgaggcttagaaaaaaggaggtcatcagtgaccttaaggataatggtgatgatgatagctcatactaatggtatatttaccaggcatcagtcacttggctgagtaattatacatgttaccttgtttaatcttcacattacccaccaaggcagaacaattattatctctgttttatagctgtggcaataggctgaagaaactttcttaagattatcacacagtaaataataaaatgtgatttcaaattgcactagctctatagcaggagctcttccacataatactaggagaataaatccagagcctgccccaggaatgttttgtttggccaattcattatgggatttttgttttgttttgtttgtttttaaactgtgaatgccttcagtaggcatacataccattgaatttgtgagtgtttttcaattgcagtctctgaagttttatgtatttaatttttattttattattattatactttaagttttagggtacatgtgcacaatgtgcaggttagttacatatgtatacatgtgccatgctggtgtgctgcacccattaactcgtcatttagcattaggtatatctcctaatgctatccctcccccctccccccaccccacaacagtccccagagtgtgttgttccccttcctgtgtccatgtgttctcattgttcaattcacacctatgagtgagaacatgcggtgtttggttttttgtccttgcgatagtttactgagaatgatgatttccaatttcatccatgtccctacaaagaactcatcattttttatggctgcatagtattccatggtgtatatgtgccacattttcttaatccagtctatcattgttggacatttaggttggttccaagtctttgctattgtgaatagtgccacaataaacatatgtgtgcatgtgtctttatagcagcatgatttatagtcctttgggtatatacccagtaatgggatggctgggtcaaatggtatttctagttctagatccctgaggaattgccacactgacttccacaagggttgaactagtttacagtcccaccaacagtgtaaaagtgttcctatttctccacatcctctccagcacctgttgtttcctgactttttaatgattgccattctaactggtgtgagatggtatctcattgtggttttgatttgcatttctctgatggccagtgatggtgagcattttttcatgtgttttttggctgcataaatgtcttcttttgagaagtgtctgttcatgtccttcacccactttttgatggggttgtttgtttttttcttgtaaatttgtttgagttcattgtagattctggacattagccctttgtcagatgagtaggttgcaaaaattttctcccattctgtaggttgcctgttcactctgacggtagtttcttttgctgtgcagaagctctttagtttaattagatcccatttgtcaattttggcttttgttgccactgcttttggtgttttagacatgaagtccttgtccatgcctatgtcctgaatggtaatgcctaggttttcttctagggtttttatggttttaggtctaacgtttaagtctttaatccatcttgaattaatttttgtataaggtgtaaggaagggatccagtttcagctttctacatatggctagccagttttcccagcaccatttattaaatagggaatcctttccccattgcttgtttttgtcaggtttgtcaaagatcagatagttgtagatatgcggcattatttctgagggctctgttctgttccattgatctatatctctgttttggtaccagtaccatgctgttttggttactgtagccttgtagtatagtttgaagtcaggtagtgtgatgcctccagctttgttcttttggcttaggattgacttggcgatgcaggctcttttttggttccatatgaagtttaaagtagttttttccaattatgtgaagaaagtcattggtagcttgatggggatgccattgaatctataaattaccttgggcagtatggccggtttcacaatattgattcttcctacccatgagcatgggatgttcttccatttctttgtatcctcttttatttcattgagcagtggtttgtagtactccttgaagaggtccttcacatcccttgtaagttggattcataggtattttattctctttgaagcaattgtgaatgggagttcactcgtgatttggctctctgtttgtctgttattggtatataagaatgcttgtgatttttgtacattgattttgtatcctgagactttgctgaagttgcttatcagcttaaggagattttgggctgagacaatggggttttctagatatacaatcatgtcgtctgcaaacagggacaatttgacttcctcttttcctaattgaataccctttatttccttctcctgactaattgccctggccagaaattccaacactatgttgaataggagtggtgagagagggcatccctgtcttgtgccagttttcaaagggaatgcttccagtttttgcccattcagtatgatattggctgtggatttgtcatagatagctcttattatttcgagatacgtcccatcaatacctaatttattgagagtttttagcatgaagtgttcttgaattttgtcaaaggccttttctgcatctattgagataatcatgtggtttttgtctttggttctgtttatatgctggattacatttattgatttgagtatattgaaccagccttgcatcccagggatgaagcccacttgatcatggtggataagctttttgatgtgctgctggattcggtttgccagtattgaggatttttgcatcaatgttcatcaaggatattggtctaaaattctcttttttggttgtgtctctgcccggctttgatatcaggatgatacgggcctcataaaatgagttagggaggattctctctttttctattgattggaatagtttcagaaggaatggtaccagttcctccttgtacctctggtagaatttggctgtgaatccatctggtcctggactctttttggttggtaagctattgattattgccacaatttcagatcctgttattggtctattcagagattcaacttcttcctggtttagtcttgggagggtgtatgtgtcaaggaatttatccatttcttctagattttctaatttatttgcatagaggtgtttgtagtattctctgatggtagtttgtatttctgtgggatcagtggtgatatcccctttatcatcttttattgcatctatttgattcttctctctttttttctttattagccttgctagcggtctgtcaattttgttgatcctttcaaaaaaccagctcctggattcgttaattttttgaagggtttttttttttgttgtctctatttccttccgttctgctctgattttagttatttcttgccttctgctagcttttgaatgtgtttgctcttgcttttctagttcttttaattgtgatgttagggtgtcaattttggatctttcctgctttctcttgtgggcatttagtgctataaatttccctctacacactgctttgaatgtgtcccagagattctggtatgttgtgtctttgttcttgttggtttcaaagaacatctttatttctgccttcattttgttatgtacccagtagtcattcaggagcaggttgttcagtttccatgtacttgagtggttttgagtgaatttcttaatcctgagttctagtttgaatgcactgtggtctcagagacagtttgttataatttctattcttttacatttgctgaggagagctttacttccaactatgtggtcaattttggaataggtgtggtgtggtgctgaaaagaatgtatattctgttgatttggggtggagagttctgtagatgtctattaggtccacttggtgcagagctgagttcaattcctggatatccttgttaactttctgtcttgttgatctgtctaatgttgacagtggggtgttaaagtctcccattattattgtgtgggagtctaagtctctttgtaggtcactcaggacttgctttatgaatctgggtgctcctgtattgggtgcatatatatttaggatagatagctcttcttgttgaattgatccctttaccattatgtaatggccttctttgtctcttttgatctttgttggtttaaagtctgttttatcagagactaggattgcaacccctgcctttttttgttttctatttgcttggtagatcttcctccatccttttattttgagcctatgtgtgtctctgcacgtgagatgggtttactgaatacagcacactgatgggtcttgactctttatccaatttgccagtctgtgtctttgaattggagcatttagtccatttacatttaaagttaatattgttatgtgtgaatttgatcctgtcattatgatgttagctggttattttgctcgttagttgatgcagtttcttcctagtctcaatggtctttacattttggcatgattttgcagcagctggtaccggttgttcctttccatgtttagtgcttccttcaggagctcttttagggcaggcctggtggtgacaaaatctctcagcatttgattgtttgtaaagtattttatttctccttcacttatgaagcttagtttggctggatatgaaattctgggttgaaaattcttttctttaagaatgttgaatattggcccccactctcttctggcttgtagagtttctgccgagagatccgctgttagtctgatgggcttccctttgtgggtaacccgacctttctctctggctgcccttaacattttttccttcatttcaactttggtgaatctgacaattatgtgtcttggagttgctcttcttgaggagtatctttgtggtgttctctgtatttcctgaatctgaatgttggcctgccttgctagattggggaagttctcctggataatatcctgcagagtgttttccaacttggttccattctccccgtcactttcaggtacaccaatcagatttggtctcttcacatagtcccatatttcttggaggctttgttcgtttctttttatgcttttttctctaaacttcccttctcgcttcatttcattcatttcatcttccatcactgataccctttcttccagctgatcgcatcggctcctgaggcttctgcattcttcacgtagttctcgagccttggctttcagctccatcagctcctttaagcacttctctgtattggttattctagttatacatttgtctaaatttttttcaaagtttttaacttctttgcctttggtttgaatttcctcctgtagctcggagtagtttgatcgtccgaagccttcttcgctcaactcgtcaaagtcattctctgtccagctttgttccgttgctggtgaggaactgcgttcctttggaggaggagaggcactctgctttttagagtttccagtttttctgttctgttatttccccatctttgtggttttatctacttttggtctttgatgatggtgatgtacatatgggtttttggtgtggatgtcctttctgtttgttagtttcccttctaacagacaggaccctcagctgcaggtctgttggagtttgctagaggtccactccagaccctgtttgcctgggtatcagcagcagtggctgcagaacagcggattttcgtgaaccacgaatgctgctgtctgatcgttcctctggaagttttgtctcagaggagtacccggccttgtgaggtgtcagtctgcctctactggggggtgcctcccagttaggctgctcgggggtcaggggtcagggacccactttaggaggcagtctgcccattctcagatctccagctgtgtgctgggagaacccctactctcttcaaaactgtcagacagggacatttaagtctgcagaggttactgctgtctttttgtttgtctgtgccctgcccccagagttggagcctacagaggcaggcaggcctccttgagctgtggtgggctccacccagttcaagcttcccggctgctttgtttacctaagcaagcctgggcaatggcgggtgcccctcccccaacctcactgccaccttgcagtttgatctcagactgctgtgctagcaatcagcaagacgccatgggcgtaggaccctctgagccaggtgcgggatttaatctcctggtgtgccgttttttaagcccgtcagaaaagcgcagtattagggtgggagtgacccgattttccaggtgccgtctgtcacccctttctttgactaggaaagggaactccctgaccccttgcacttcccgagtaaggcaatgcttcaccctactttggctcgcgcacggtgcaccgcacccactgtcctgcgcccactgtctggcactccctagtgagatgaacccagtacatcagatggaaatgcagaaatcacccgtcttctgcatcgctcatgctgggagctgtagaccagagctgttcctattcggccatcttggctgccctccagtctctgaagttttataaactctattcattcattaataaattatttcaacaaatatttcctgagtgtccactgcatgccaggtactatgctaggctctggagatacagcaataagcaaaaatgagcaaagaccctattttcgtgtaggcttaattaaataacatacaaaaaatgtgtgtgtgtgtgtgtgtgtgtgtgtgtagtgccaggtagtaatgtgtactaagaagaaaaataaattcagggtagcagggacagagtgtgacagatgactatattgattgtctgcattgatggtggggtcactgggcattttttatgaggagtacactacatttccaggtttattcaagttaggaaatggagacatctgatcatgtgttgtagaaagaaaatcagaaatcacataggagctgaaaagggtggcatgagtctaattgaggaatttcttacttttctgtgatagaataatgtgaatattcttgaagaaataaggtaaagcaaatggccctgggagaggtggagaaggcagggctaagtgtggaagctaggttccaaagtgacagtatgcctgagatttatgccctgggaagcaaagggattatttcctcaaaagcttcattgcacaaattaactcccaaggtatgctatgtggataaaatcatctcctataccagttctctggggacagcaaccattttgggttgttggaagcattgcagaattggtggtaacacagtttctatgggcagttgctttaagaacctgaagcttgttttgaggttgccatggtaacaccactgctggctgcatacaacatctcacccaggctctcttgatctaataaccaggacccacattgccttgaactcccttaaacaaagtgtgcttttagcagactagctttttttttttaacctctctgataaatccatcaacctattttattttggtttctgtaaattgcaaattactgaggagagagaaattaggagaggaattgtattgttttaaactcatcatcccgatttagaatacttaatgcaaactaattaaagatctgcttgtgctatgatctgctattttcctgttttcaagtttttgcattttgaaatctatcatatctccttgttcacacaataaggccttaacaaactctttgtgaatgtagtttctctgacctctctactctcatagaaaaccacaggatactcaggagtcttgggctcttttcttcctaatgagctctgtttgccatggtttaggagaggaagaactctgagtataggggatgatagattttgctagtgttcacttagacctcttctctcaaaaacatgggtgagagaatcacaaatttttgacactaggatacttgacagtttggcccagtggtcttttaccaagatggctccacatctcctacatcccaatgatgatcataaacacttgctgatttaatagacaataatgttagtagcctgaaatcacactagtagtttgaaacccatgatgagggtacagatacaccatggaaatctaaatgctgtgaaacagtccccgcttcccactgctgggctggttgttaatcatttactggcatacctgtatcaaacccttcccttatcatgcgggtggggagtggtgagaaacaggcttcttatcactagattctatgtggccattaaatgatggaaaataaaagaaagggagagctgtaatgcataatgctcttcatttttgtttagtaatttatattactttggaacaagatgaaataaaagatttaagatgagatttttctctttgcataataaaatgtgaaaaaatatttgattacaaaagctatctttatagtagccacattttatttggtgacttgccttcagacttaagaatcttttctaacaattttatcccatttacaaaaaaatgctcaataaatatttcgaaagattaggtcaaaagcccttaaactaatctgtagggttgacaattaagatatcattttttttctataactgatcattgaattttgtagtgatgagggaagggtagaatgcatagtgagtgacacacaagtacaaaaaagagttggttataatccaagacttacatcttaaagtaggaataatttttaggttttgccattcaaatcagcagatagccacagttattacattacaaaagatttctgagctccaagtgtttgcctgtactttgacttactaagcattcaaaaatattttcctaacagcatcatacttttattttcatgttgtatatattttaacctttaagttatcgtggaaattccttaacagggtcttcttcccagtaaacatgcaaactgaaacattagcacccatttattcagcatcttagaagaaatatgcttaatatagtagattttcctaaataacttaaaccttaacccttcaaattctaagaccttttagaaaccatttatctgaaatcctttttaaatattttaaacatatttcttatttcttaaactaagaatttaaactctccttgctgtgatagggcaatcgtttttctgcaatgtagaaacaactactttcaccagcttttaaattttatttagttatatccttaaatgccaaactgcaaaatgacctttgtcactggtgtggtcattgtattggctcagaagccctgctcccccctccccttttagtttcctgagtagtgtttatttattattggcactgaaatccattcataaaacttgtttagagttacatactagattcgattttattaagactctaagtgagggtgtgagaaggaaaatccttcgcttttcagaagactttgttgtggtcatatcaggcacttggaatatggagataatgaaatctactccaagggatggttgtgagaggcaacaaggaaaggcatatgaaatgaatctataggatgctactgagaggtccctttatgcacacaactgctacaggccccaccactgttgttcaaagttccccaccgctccatccccttaggcagtgtggggagagccagtttcccctccttacaagaggagctgccagagcaattccagtagacccttgggtatatttatctacctaactggtttttagttaggttgatgaaagggaatgagaagagataaaacttttgcatctgagtttctctgtttttaaatatggagtattactttgagcctaaaaatgctcatcactttcgacttagtaatctcccttctagaacttaaccctaaagaaataatcagacataaggagaaagatttatgcataaacatatttttcatctcactttcatcccatttttacattagtcagcacaaactttggctgtgttccagaaaacatattgcgccaagactggcagacattggtttgagtttatttaactgtcaggggatggcttttctttgtgagctgattccacaaattcattacatacttaaatcttttatgggcatcagcaatgtaagagtagtgtacttgaagggctcaaaattgcacacaaacattagcagatagcagtgctggatattatggtttagacttaatatcttttaagatattttagatcttgtagacccaaactcatccttgatttggctatgtgtattctatgacattctgtatatgagtaaaatactgggttctgtgagagcaggcatcaagatagaactagctgtttaaaagatttattgtgggaaaagcccgtgaaggataaaggggaaggagagcatgagtagggaataaaaaaacaaaaaatagggtagtcctgtataatttcttacaatttggattttgttcatttcatcccagtagtattatttaacatgttcctctgtcccctaagtatcagatacagagggctgatcacattagaatttaatttgttccttccttccttctcccctctcctcccctccatcccctcccattccctctcctttcttcattcttggaaaactacttcataggtgatggtgtgtgcttccatcaagagtcagataacatttgtctcatctgtttttctgtgtgtgttagcagcttgattatcattatgctagatccattaattcattaggggttgcaaaatgctgacatttgaattatttctgtcttcacttactaactagcatacttttatacagagaaacttcccctcattagctatttggttgttttgaggttcagcgcaaataggaaacataggatgaatactagattttttcttttgcttaccatttttcaaaatggtaagttgattccttagcattttccaaaggtggaaaatgagagtttttgtgtttgtttagtattattatgaactcatggatttaagccattgtagttgttatctttatttgacactcaaattatttcatctttggccagtaggagtttatataggtaggctcctaagtctttttgacagaatcctagtagtctctgacagccttcttgctttctggtatgatttagtgttcaggctcatcttgtacatttcctgcctcaggtctcactaggtcacaagccatagttcattgtagtgagaattgattttttagaaacaacactgtaagtgttgggagtgttcattgctactgggtaggttattttttctagaccttttcattgtacaaaactaagaaatatttttttttaaagttagagtatatccagagatcatacttataattccaatttatatctaggactacagggttactacttcatctcatcattttttacatctgaatttctttatctccatgctaaaaaacctgcttctcagcaactcaagcctgattactcacttgttttatcacatactacaaatgtaacagccttgggataacaatgctaatactaggactagctaaattgttattgaaaaaaaatgtgaagttcttttttatctttaggatatataccattagaaatgaactatcaaatccgtgtattttaaaatcagttagaatagttctcctcctcaaccacttgtatacatatttaggtataatttgtatcactttactaatcttgtctctggtgccattcttatttccctctaccctaatataactagcattttctccctgtattatgtttatctctgtaataatgagaagtctatgagaagtataatgagaagtataaagttaactaggaactaagacagaatttgaagtacaaaaatgaatgtggatttaaaaataaatgtatgcacaatagcactatatatatatatatatttttttttttttttctttgagacggagtcttgctctgttgcccaggctggagtgcagtggcacgatctcggctcactgcaagctccgcctcccgggttcaagcaattctcctgcctcagcctcccgagtagctgggactacaggtgcccaccaccatgcccagctaattttttgtatttttagtagagatggggtttcaccattttagccaggatggtctcgatctcttgacctcgtgatccacctgccttggcctcccaaagtgctgggattacaggcgtgagccaccgtgcctggcctatatttctttgtgagctgagaggtcttagaagcaatgacaccccagtagcaatgagcacacctagaacccagatcttggtttctaatactgttctccagtaaaagggaccaaagctcaatgaagaaatgcctgattctaaggctgtggcagagaaagataagatgagtcgggagcattgtgtagtactagaaaggaaggaagtgtttaaacacacacacaaaatgataggggcatgtcaaaggggcataggagccaactaacagaactcctaataaccatagctggaagaatttgagcaacgaaataaatgacatagtgttggattataatccaaagtataaaacaaatatctgcgagtccatattgatatattaataagtaaatgattgaaaaagtcagtaagtgaggagaagagacacatctccagtgcagaattccaaataatttatatggatactctaccctcaaaaagctggaacatacttcccactccttaagtgtaggctatgcatagccttttacagtatgttaagatgggaaaaagaataactatagtggaaaaacttgacaaacaccacctcagccaggtgatcagatcaaggtcaacatcagtgataaatcatgcttgtagcatgcacccttgatataatgttaatctgcaatacttccttaatttttctggtattactatgttgggtttaaaaaatattttatctatcctgaaggcttttaattacaggtggaaacctgttctcagctttgtttgagctagtgaaaaaagtatgaagcatggtttctaccttatggtaacttagaaactagtgaaggaaacaagatctagcaagcatgtaatcaaaatataaatcataggacatgattatacaggatttttaagttgagaaaagcaaagcatagctatactgagacctggtgtagctagaggaagttttaaagaaaatagtctcttctgttaatactatcaggatttctgtatgagggaaatgatagggattgatttagaggctcaaaaattctctaaatatatgattatcaccagaaaacaagatatatatattttaagaccattacattttgtttctgttgaccaactgaaatgcaagatgactaaattagttatttttgaatcccttatgacagataataaaaattggtggctcacttaatcacagtgtggtcagaatttattagaaagacagcaaaatcattggattgtatatgataccctgcatttatttgatgtgtagacctggttaaatcttggattttaagcatttgaatgttacgttgctcttttttgtttttcctttaggactatctgctgccaaactcttgactgaatatggcgttagtgttttggttttagaagctcgggacagggttggaggaagaacatatactataagggtaagtgattttaatacttacatgtaatgtaatatctcactcaaactacaagtggcaccactggaaatcacagggctagaggaggtcttaagagttcatgcagttaagccgtttgtcctccatagccctaaagtactcccatcaaataagcgtccattctctttaacatgtacgcactgaagactgacagcttctgaatttcagtggagtgaattcaaaaaacatgagcaaataacttcaatacagtgtcataatttccatactagagacgtaaatgaagtgtgtagtgtctcagatggggtgatagtttggctgtactggaagtgactatacacccgcaatacacacagacacacacacacacacacacacacttagattccctatttatccaatgacacacaacttaatagaaatgtggtggcaaaaacccaaaaaaccaaaaacagacaaaaaaagaaatgtggtggctgcagtaagcaggaacaaatgtagcatatttttgcataacttttcccttggcccttgttccctaagaagtatgcttctgccagagatactcctcaggtcgcgtctggctacatgtaagaaggaagcccagttcttgctacatcgctgctttttttatacttcggcttacatcaccattctggaaaaaatgcatgctattatttactactattaagggaatggttgcaggtggttgactctgtgggtactgatgaaagtaggcagggagataatgaagagtgggaaggaaataggggcaaagatggaagtttttgcacataaaagtgggggagaaagggagaagagtcagagagaagtagtagaggcagaagaggaggaccagactagaccagcaatgggtaagtcagtggacgaaagaggaaggggtgctcaacagtcaactgacacaatatgaaggcaaacaaaacaaaacaaaacaaaacaaaacaaaacaaaaaccctcgcatttgacagaagttcattaattaatgagcccctttgctagagtacacaaatagagtgttaaagactagggattgagagtaaagacaaaactagactgttgaagtgactggaaagaaaggaagcatctatctaactagaagatgcttcagttagactaataacagaatggcgtaagcaatgcaaacatttgattatttcacagaagtctggtggcagatagtccaggctggtgctcttgctttttgctcttctttctgctctgatattctttcttttcttttcttttcttttcttttttttttttttttttttgagacggtgttttgctcttgtcgcccaggctagagtgcaatggtgcgatcttggctcactgcaacctctgtctcccaggttcaagtgattctcctgtctcagtctccagagtagctaggattacaggcaccccccccaccacgccagccaattttgtatttttagtagagacagggttccaccatgttggccaggcttgttgcgaactcctgacctcaggtgatccactggccttgaagcctcccaaagtgctgggataacaggcatgagccaccgcacccagccctgctctgatattctttgcatgtaggtttattgtcttgtggtaacaagatggatgctgagattctaagcatcaagttctcattcaaggctgaaaggagagtgaaagggtggcactagccttgtctgcaactaagcttttccttcgccaaaagaccccagcagacatttgctttagtctcattggctagagttgagtcacatggctaccctcagctgtcagggatcctgggaaagtaagtatttcacaatactaggctacataatggaagcaggcatgggagaggaaatatcaatggatactagaataacctacagacaacatttgaattaggatttcatagcagcgatttcagccacattgtaccatgctacccttctgtcatttgcttcctacctttttagatacagggatgtatctaggcctatttctgctttgctcagctctaagggtgctgtacagccttgctatgcaaagtgtcatctgtgggtcagtagccccagaatcaactgggattttgatagaaatgcagaatatcaggccctatctcagaactgctgaatctggatctgcattttgacaacatctccaggggacactatagaagtgctactctgtggcatttgtttgcttgcttgccttaaactaatgccaatccggattaaattttctgagtgctcccttagatgtagtccactgggaagctattggtctgggagtgaggagactgggattctagcctctgtactgacttgacatgatgtcttggataagtcctattagcactttacatctcagttttctcatctgagtaataagatactatctaaatgtcctcgaagaaactcccttccatcttcaaattctaattgaaggcagcgtgttatagtgcaaatgaagagctgcatcttctgcctgtatgcctttattagatatgattcttctgtcattttctgaaaaatattcctccactttggagatagttattaagttgtcccttagctctatttttcttatctctaaaaccttttggttattaaacaggagcattagtcatgttgcggattttcagttaagaacaagtttctttgtataagggaaatgagaattccaacatacttgtccccatctgtgttattggccccaattactttgccatgctgtgtcatttatatatgtcagcaccacacaggaactgttattgtctattcagcatgacattacaccccccttaggaatgtgagaaaggaatctctgaaatgcttggaaattaggacttagcatttatactccaaatgatgagaaggagagaaagagggctttaagaaacaggcatggaggccgggcatggtggctcacgcctgtaatcccagcactttgggaggccaaggcaggtggatcacttgagcttgggagtttgagaacagcctgggaaacatggtgaaaccccatctctactaaaaatacaaaaagtagccaggtgcagtggtgtacacctgtagtcacagctacttgggaggctgaggtaggagaatcacttgagcctgaaaggcaggggttgcggtgagccgagattgcaccattgcactccagtctgggtgacaggagtgaaaccctgactcaaaaaattaaaaattttaaaaaaggaaacaggcatgaaaattgtatttaataagaaactgaagcaaatattttttaaattgcttctaataacataatcaattaggataattttgggaggagatgccataaaagctactatggatctctgagtaccagaatgtcaaatttggtattacctggcaagctgttcagatgcgtcttccattagttcagaacttgcccgtttttcctaatgtgattcatccatgattcttcagagtcaaattaataaagttgaaatgcctgcagggctgccacagggttggtgtatgtttccaatattgttgcatgtttgtggcctcttcaaaggctgagtagtgagatctaaatcaagaccccaaagactgaggtgcaacacagtagaatacagtgttaccgcttctagtgtcttcatgctgaatttgaggcacttcatttagaacgttcttactttgtaaaggaacattctgcaaaatgcctcactctttttactgcttcatttaggattatttgctttaaagatagtgtcagcattctaaagacatcatgtttggaaactcccaggagtccccttgctgtctttgttaaagcccagaaatttattggagtactaattccagttttgttcattatatcttaaaatagttgttgtagattagaaaaggtttgaaggacagcactgatggttactaaaagagagaataaacattatatgagggcacattaaagaagtcacagaagcacttcatttctggtattatggcagaatggaaaccctaactcctcattgaaataagtaaaatgctgaatacaatatgctgtgctcatctgacatggaagttagaaatttgtagatctcctggatgttgcatagacatctcaaacgtaacacatccaacactagacttctgatcttccttaaggccgctgttccagctgcccatgttagaagatggcaacttcgaaaaaactcagagtcatgctcaacactaccagaccctcatttgttttgtcaggaaattccgttggccctgccttcaaaacatatccagaattcaacgcttcccaccacttccactgctatcccctggtgggagccaccattatatctctaggccagattactagagtaggctcctgattttcctgcttttactcctgccgcctacattctgttctttcttagtgcatcagtgagagtgagcctttcaaatgtaactcagattttagcatttccctgctcaagaccttccaacggctccccttctcactgacagccaaggcctatgtccttacaatgtcctgtgaggctttacgtgacctgctctgccaataacctctgtaacctcatcttcaatttttttccttgctcacattgttccggccactttggcctccttgctatttcttgaatataccagcagacttctgtattacagtctttagatccatgttgctaggagtttttgctttttttttcgagacggagtctcactctgttgcccaggctggagtgcagtgggacgatctcacctcactgcagccactgtctcctgggttccagcaattctcccgcctcagcctcctgagtagctgggattacaggctcacgccaccatgcccggctcatttttgtattttcagtagagataggttttcaccacattggccaggctggtgtgttttaatttctacacctggaatgtttttcagttatttttcgtcatcactgcattgtggtcagagaatattgtttcatggtaacaatccttgaggctcgctttataacctagcaagcacatggttaatatccaaagatcttctaatttctgcttgaaaagaacatgtagtctctaaaagctatatgcagtgttttatatatgtccactagaataagcttaactgtgctccttcttttttgtttgcttaatctattaatcacttttaaaagtatgttaaaaattctctgttctactgggcacttatctttggttcctgtcaaatgttgcttacattttgaagctatattactcagtttatgcaagtttaaacttggttagccttctggatcttttagcattatgtagtgacacttatttcactgagatttattttgtttaaggttttctttgatattaatatagttataacagcttacattagtatttgtatatctctttatctttcagttagagttttctttattctgactttttttcctttttttaaattttagattcagggggtacaggatttttatttatttatttatttattttgagacagagtctcactgtgttgcccaggctggagtgcagtggcgcaatctcagctcgctgcaacctccacctcctgggttcaagctgttctcctgcctcagcctccccagtagctgggatcacaggcgctgccaccacacccaactaatttttgcatttttagtggagttaattgacaaacttggtccatctatatttgttatgatttcttttttaaatgttttaactttattatattatggctttccatttgtcccactttaacagttttcctcttggtttctttctttccttcttttgggttaatggttttcttctttttgttttctttttaagttttttcttctacttgttcagaagttatatagtcagaccaatgtttttcagacaattttcctaactatattaacactcatacttaatgtagtctaaagtttatcaacatactatctttctactaaaaaatacaaaagctttcatgcttcagttgtgagcacccttcttccaatctgtaaactataaaagtatttcaagtttgtatgtttctcagacattattaattttattttattctattgttgatgttgcttaattttctttaaagttttgccagtatctttgttcactgtccattcttgaatctcagaccttttatttgtaaccattttcattctacttgaaacacaccctttcctccaatctgggtcctaaactctgtacacttgtcagcttgacaaaaacatagttctaacaggtaacaaattctacttagaatttctcttcctctttttttttctctcagaacagcaaagatattattcccctatcttctggcttgtatttttattgttgaagagtcactcgtaagtctaattgttgatttttttcagagtatgtatgatttgcctcttttgttttctgaaaaagaattgcttttaggagctcttttctttggtatactgcagtttctctgtgtctgggtgagaatttcttttttatttatcattctttggacctgttgggtttcttatcttccaacaatgctggtaaatcctcagccactattttttaatactacttaatattttgacaccatcttccatgtcttaactacctcctcaacatattttccaattctttatctttgaactgcattctagataatttattcagatctagcagtttactcactctttaactatgtcaaatatatggtttaatccattcacggagttttaaaaattttaattagtacatttttattgctagcagttattttttaatctacttgataatattttcagtttcttttcccctgctcctagttttaatgacttattttatttaaaatatattgcatagtacttttagattctgtgtataattcaactattatgaaatctttctggattattttttctgcttattttcttttggtgccttgtttgcatgtatgttttgtaacttttggctgtgggttgctaattttccatggaactttatctgtgtgtaaattatttgaggcataggggaaaaggacttaagtctacttctaccaccgtccttgacactttaaattttctgcccaagttttttcatatcatatggatagcttaaattcagatggaaaacataaataaagataagctttttttttccttttctttgtgacaatacttagagctgcaaaataatggaaaatataaagtcgtggatgcagctaaagcaatacttagaagatgtatagtctaaattcttccattagaaaagaaaaaggctatatatgaataagctaatcatgcaaagagttagaaaattaagagcaaaataaatccaaagaaggggtaaaaagggaataaatcaatgatgtagaaaatagacacccaacaaagaggatcaataaaataaaagttgattctttgaagagacctattaaagatacacaagaagtgtctgataagatttttccagaaaaagaaacaccccaaataaatacgagatcagagccagatgtggggctcacgcctgtaatcccaacactttgggaggctaaggcaggtgtatcgcttgagcttaggagcttgagatcagcctgagcaaccctaaccctacaaaaaatacaaaaattagctgagtgtggtggcacatgcctgtgatcccagctactcaggaagctgaggtggaagaattcatagagcccaggaaagtcgaggctgcagtgagccatgatcatgccattgtactccagcctgactgatagagtaagaccctgtctcaaaaaaaaaaaataaaaataaaaaagatgaaaatgaagatataattactgatgcaataaagaataattaaatgaaaagaagatgccatgaacattaaaccaacagttttgaaacatatatgaaatgtacatattgtgagaaaaatataattcatcaaagttaacagtgatttagtctggaaatagaaaagatgggtagtgctttaacctaaaaataaattaaatgtctagtttaagattttccctaaaaaaatcaccaagcctagctagttctacaggcatgttctatgtaatgttcaaagaatggatcactttatttacatacaaacctttctagagaatagaaaaaagtatgatcactaaggagattagcagtactgtaatgcaaaaaacagacaaggcagtagaagaaaggagaatcataggccagtctcaatattgcttataaacatagatataaaaattctaaacaaaatgttagcaaagcatatcctccaacagaaagataatatcacgttgggtagctccaggaaggaaatgttgaataatactagacaattttctggaaatagcagattaggtaaattataacaaaatacaaagagactagacaagttgcactgtatagacacacacacacacacacacacacacacacacacacacgcacgcacacatctttaaagcattaaagagccagcgagctaacaagatagtgaagaatcactgggccaacatctggaaaggattaacctacttttccctgggtggcagggggagttgctgaccactgaagaagctcccgaagctgagcagtgctttggacctagtgcaaagctagggtgacaggtcaagtccagagccccatgaagtgtgtactgatttctgggggagtgtttgtcaactccttgtgctgtgggttgggctgcatctaaggaccaagggtaaatggcaagaaaactaggccaaatgtgcatttcggcccagcttcaaatcctctcaggtactgaaaatggtataaagttatctggtactgtgagagtcccaggctgtgggcagaagcaaacataaatcctctctgagaaagatatcatcttcctaggattcaaatgatttctacatgttttcaagtgcaatgagtggcattcaacaaaaaataatcaggcaaacaaggaaaaaatgcatgacaacatgcttgagaattggtatacacaacaaaatagacacagaccctttatttattaaaaaaaaaaaaaccacggaagggttgcagctcaccaatattcaattattgattaaatcattggaactttccaattaataaaaacagctgaaaagcatggagaactgtatttatgagggaggaagtaaacaattttagtttatgatagagggtttgcatatttgtaaataatttagtgatatgtgaatctttttataccttcttgtattcttttcctatgacgcattctttcctggaagtgttttaaaatagcatctagagccatcaatgtggactgatttaagatttcacctggtggaaattagggaattaggctttgggtggctcctccagcaataacaccagacagaagctcacataataatttaaatgtttcataaaggatctaaactggcagaacatactacagtgttctttatcttttatgcattgtattgctgaattggccttaccaataactttaccaaatgatggtgcttagtgatgagtgttagacaggattgtgccccagttcttgagtggatgaggaaagattgccattttcagttgctctttataggggagatgtaaggcacaattaacttttaaaaaaataaatggggttatttttttacaagacaccttttttccaagttttaactaaagtcctctgaccaatttttctctttttgcagaatgagcatgttgattacgtagatgttggtggagcttatgtgggaccaacccaaaacagaatcttacgcttgtctaaggagctgggcatagagacttacaaagtgaatgtcagtgagcgtctcgttcaatatgtcaaggtaaggctgacttttcacccaagtgactgatagggaagcattttatttgagaaaacatttggtttgtttttagttatttttctttcaaagcaattgtaaaagtaggctcttgactttgaagtagtatttgcctttcttttcttgttttcttttttctttttcttttgaaaaaaatctctaaagtctcctggaatcactgcaggatattatgactcagcttgaccttcctccctgtcaccctcagtggccctcacaagctatcctcactcccagaatgggaggctctgggttccctcctaatgcatttgaaggccacaggggtgggggtggcaggtgcctgcaacagacatgtacacacacacacacacacacacacgcacactcccctcccccagctacaggcaatccctgagcaacctagggagcaaccctagagctccaaggaacacaagagtttgaggccacttctttagcctttgaactggttattcatcctcattcttacctggcattatttggaatgcttcatttcctctgtacctggccttcactcttgggaagtctagcttgtttgtgcagtttcctactgtttaaacaagagattgtttaaactctagccactgatttccacagctgttgccagtgtttttctttctcactgaagccaaacatggagtggctggagtctggaaacatgccttgagaaatcaaagttcccatctgacattgcagcctacttcctagagctagtgtcactgaggaaggggtcatttactcattctaatgtcaggattcccacaccaataaccacatcatttctcaacaaatacatcccttcccctactccacctcgggcaataactgtgggtccggaggctacagggctttgggtgtgtcctgggagttgaggatacttgtgacatatgtacactgataaccaatcaggagagaccagaaacctttgtaaactctgatagccacatggtttgagatgcttgggatagtctggtggtgacagatgtgaaaaagcaaatcagtagtctttttattcttttctttttacctttaagctctgttggacttgaaaatcagtagtctttagaaaaactgtgggttcagaggtcaagggaggaatgaagaaagtataaaaaatttcacaaagtatttaggaactctggctacaacaggctgtgatcaaaaaggaaaaacccctttgcttcctcattttctcttttctgcactgcacagtgtttccatggactagtaagtaataacaacagtgagaataatagctgctaacatttattaagcatttttacctgtattctcacatttaatatagggagagagaccaaaccctttgcgctcaactactaattaaacagtcatgtaaattcactctccactccaactgggaagcaaatgagtgtgatgattatcttggaatctgtgcagattcatgctgataagattcagaggctgagaggtttttagtttacctggaggctaacaataaacaacaactaaaagctttttatgcatgaactcattaaatccttacatccaccctgctaggcaggcattatcatccccattttacgtttgagaaaccagaagttcaaagaggttaaagtgacttgacaaggctataaaactcctaaaagtctacctaacccctgagtgcatgctcttcattatcccgatatatggcctagaaaatgaaactgaggactctgaatggagatgtgctggacctccaatgtttgtttgtcctcacacacatctacagtaaggtatctcactgtcaatatcactgaagtctgggtcatatgatgaggagattcagtcattgaaagaccactttttttcctactttcttactcttcttccagtttcatgttccttttatgtacattttaaaaactgggaaaaactggaaaaaactggaaatttacaagtatgtcctcaagctaggtacctgctagtctcccagccacgcccagtctaaaacttgatattgggctgggtgtggtggctcacatctgtaatcccagccctttgggaggccaaggcgggaggatcatctaagaccaggagttctagaccagcctgggcaacatagtgagacctcttctctatgaaaaattaaaaaattagctgggcatggtggtgcacatcctgtagtcccagctatttgggaggctgaggcaagaggatggcttgagcccaggaggtcgaggttacagtgagccatgatcatgccactgcacttcagcttgggcaacagagcaatatcctatctcaaaaataaaaataaaaaataataaaagtaaaacatgatgctaaggtgatagtttgaaagtggcacccataggcagcttttgtaagtaatttagctcctcattgttcttgatggaggcaaggtggagttaaaatgataaagttctgtttgagaattttgactttgcctgaaagtgatcaacagatcgtgacatgctatccaaacttcctaacaggaccttacaaattacatatcttaagtgttagactttctgatgtctctgaaattttctgggctttactgggaaccctgctttctagaaatccagatgtaattgttctgtactttaagaaggtggtcctgctgcaagctttaatagaggatgaactaatggaaagacttaaggagatgatgcacgttacattaggtgcctaagtaaggaaatgttaagagtagcatccagggtcccttttttgattttgttgctgctgctgagtcccgctgtaaggttaggtccacactaccctgaaagtcctgttcctaaagaaaaaacaacttcagctttctggaggggagaactgctcaactctaccatatttttatttcacaaaaatacaaatatggctgtgctattgcataacctactggacaaaggcatcttgccatggcattggacttggtagcccgaggctgctttcaggaatgtaaggcagaaaataaaataaaaacaaaaaaagaggctaggcgcggtggctcatgcctgtaatcccagcactttgggaggccgaggcgggcagatcatgaggtcaggagatcgagaccatcctggctaacacggtgaaacttcatctccactaaaaatacaaaaaattagccgggcgtgctggcaggtgcctgtagtcccagctaccagttactcagaaggctgaggcaggacaatggcgtgaacctgggaggcggagtttgcagcgagccacgattgcgccactgcactccagcctgggtgacagagcgagactccgtctcaaaaaaaaaaaaaaaagaaaaagaataaaaaacaaccaaacaaacaagaatgcaaggcattgttaacctctggatctttgccattgcatggccatgcacatcaacacaatggtaatattagaccataattattgcatatgcagcacgtggcaggtgtgtgctaaaacacataccgtgcctacactttggacaacaaatggcacctttaaatcacagccgctgtggttgatccctcaaggtcagtaccgctcccatagtaataataatgactacctcccctactgagctcccattatgttccaggccctgtgccagggccttcacctccattatcttacttaaccctcacatggatcctaagttaggggttattgcgccatttcacagaaagagtctgaagttcagaggcccagtaacctgcctaagagagtaagggaattcagattaaggtcttttgactttatgctgtctcttgctagtccagattctactgtcagggactgtggactccaggaagctgccttacagtttgtgcttgtcctggctctttctggcagctctcttctgatggtcatcctgtgtccatcattgtgtccccatatgcagtgctggtgaccattttgctcaatcttttgacccggaagcctgaaagagcagtgttaactacctgctatgatacaagcactgtgccttggttattgtttgatggatgcagtaactggaaaacagccatttaactgtcagaaaataaagattgaagctctattttgaattttagtacttattttcaaatagctacacatttaagatggtaagcatcattcttttcattgaatacttaatctcatcgaatgaaaagatgaaaaatagaaatatatatcattaaaccatcctctcacatactttaacctttcagagaatacatattttcaaccaaggtagacaacaatgttaaggcaaaaaagtagtgggttggttaaagtttagtttatttgatctgaatgagtgcctttttgctagtgttttccaatacatcatatcatttctggaatgagaagtactcattgtagtagatgtttttatgattatcaggaaactatattagggaaaagcaggaagatatttagttcaatattccagataagatgattaataaattgtatactaaaagtaactctacttattttaaaatatcttaactctcactgtttttctccacttctaggggaaaagtgggtgtttccccaatgtgatagtgtattgggttaataatacaaattgtatttgtgacattttctgcattgctttttgacaacttcagctttcataatctaatacagtcaatattcgtttttgtaaataacactgaagtgaaaaggaagattgccattttctagataaaccaatcaataatctttgtggcccagattgcttcagctcttaaattttcccaatgcgaaaccttaaagaatgtttaaattgtttaaacactgtcaacagtctgtggcacatctagtcccagcttactctaggatggtttttactattcaccaaggaactactcgttacctttgttagattgtgtttacagtgcaagttttagcaagacagtgtatagttccaagcctgagcctctcagatggatactgaggatacaccttagtggtgtttcctctacctgatcccttccttttctgagactatgcctatctactacgttcatagaggattcacatcgatatgctaaattcactcattgcttaatatttatatttatgtatttgataaatatataagtatttacagagcaaaatctactctgtaccagatattgttccaagctgcagatagagtggtgaacaaatgatcaaaatttctgccctcatggtccttctaatctaaagagagaagacaagtaaacaagaacagtaaataaatattagctaacatttttgcctgtatccttcatggatcttgtgaatagaatccctcttctaattctggtttagaagatcctgattcttatataataggttcctgactggtttctacagtgagcagcttttatgaattttgtgaatttgacatgcttttattggggagattatatctgatctgtgaaattaacataaattaatcatatcattgtgaaccttaaaggtagattcttaaatggcatcagctagatatttttacacttgatcttagccaaaaagccaagaagcagtagctagatatgtttaaaacattctctttatcggttgcacatggtggctcatgcctgtaatcccagcactttgagaggctgaggcaggaggattgcttgagcccaggagtttgaaactagcccgggcaacatagtgaggcccccattgctacacaaaaatttaaaatataattttaaaaataaataaaataaaacattctctttatcagttcttctcttctgcatggcataaaggaagcagctggacctgaatgccaagtggattgattcattacttgcattagtaaataagatgctccatcattatgagtgtgtttcattgagttgtggagatcttttgttaaattttgcaatgctgtgtcttgcagaaaaaatgaaaatgttggattccatttttttttttttttgctttccatgagtttcctgcacatcataatgcaggtagggtgaggggtatggagagggagaacccagccagaaatggagcaaggcattttgcagaggctacttcaaaggagaaattgacaattacatgcattctcacgttcttcctgcttttcacgtcctctctaaataaaagtagagactataaatatataccacccatttgtttttagagagtggtgtgataaagatttatttaaaacaacataggctttgctgacagtaacagctcagcaagaatttttttttttctttttgtattggttctattcttcccacagccctttactccaggtttctatgccaacgactgaaatcaaaggcttttcacaatgtgtatgttctggaatactaagtaaattttgttgttgctaagagggaaacttggttttagccagcaggccatgtagaaagcagagtttgtcttaatgcttaccagatataacccctcacttctaatagaatttgacccatggcttataatagaatttcttttggatatgcgacatttcattttaagtttcttttagtaccttgtccatactaactcacagaagatatttcttttatcttcaaagaaagatacattttcactttcaacctctctcagaaggaaactcaagaagcggaaagtgtgaagtctttgtagggatgttgcttgttgtatatttgcctcctttcttttaaacacctaaattcatccctcctgatgccatgctattaatattgccttccacctgtaatgtacctatacatgttttacctcacttgagcttcccaatggtcctcagagtaaaaagcattatttttcccaactcagagagcgtaggagccaaagtgtggctttccagctctaagcccagtgttctgtgggttacatcaccttgttttttattccaaagttaacttgtgaacccttctagtaaactgctccaagatatgacaaaatcactttatcccaacaggctctgaagttgtaagatgcccctttggaaacagggactcctgtggatatgggggtggtcgttcatgggagctgtatgtgacacagtttatatttcacagttcacagttcatagttcacagtggttgtacatgggagctgtatgtggcacggtggcttctcttctcttgcaccctgagctgtagtctgagaggtcctctggccttcagtgagcacctggcagctaaacagcccccagtgtgtcccagttaggctcagcaggctgaagaccacagatgtattctattattttgttaaaatactaaatctggaggtctaaggcatggtttgaaattgctggctatatattatttttgttaaatgatccatgtaaacttattattcaaagtatggcccaagtattggccagtattttatgttataccattatatcctgcctgattttaaaaataacaaaaaaggaaaggatttaaagtggttcttgataagtattacaaatttggataagtcagggtagaagatagaaaaacaaaacaaaacaaaaacaccagttaggtaaggataggcaagtagttacaggcctgtgctcatgataagaaattctgttttgatgatagaaatgaggtaatacagaagggattgctttcttctctcaatcacaattctgagtaggttttaaaagcagagaggctaaaaatgtttacatattttcagtttgatctatccagtatccagtataaggatatatgaagatagctggtaaaaaatagtttttagtaactttcattcttttttccccctcactttggaaagacttcatttgctgcttgtgagttcccagagagcttaatggcagaattcctcttaaagctttgcactgtttagagagctaggtcagcattagccatctcctctcagaggctccttcttcctataaactctcaggattacatctcagatttggtttcaaaaatataaagttcctactcagtgacaacccaatatatagcaaaataagttaattattagatttttttcttaaaaaatggtaaagtacactaacataaaatttatcatcttcaccaattttaggtgtacagttaattcagtagcattaagtacatccacattgttgtgccactgtcgccaccatccatccaacagaacccctctcatcttccttccattcatttctaatagggactaattcactacaggaattgtttctaaccattcattgagaagtaacctagcatcaccctcccactggcagcacagaaagggggttaagtcagacacaaaggatttctctcacactcaggctgagggactttgtgatcacacataatcatgtagtgcctcagtatttgggttaatggccaaaagaactttgtgaatggaattaaacattatatgagcagcttcctcaagagaaattgctctagtctccataataactgaactcctggaggttctgacctttcaggttaaaatgtagttgcctctcagaggttaaaatctcctccttcttccttgctttctacttccttcctatttcttctcagcaacccctgtcctcacctcagtggcatgcacattactccaatcaaaagactcaatcattgatctttaattttcaaacttttgcaaagtagccttctaacagttgaaatcttaaacagcctctaacgtccaatgaatcccatatctagtccattctgggcacttcctgaagaagggaaattcagttgtctcatgatcacatgttgagccagctagaaaaccttttctgtcattgcctcatcctgctgcctaataggatcgatgctgccatgtaaccctctgtatcacgtgcagactcaaacctttttcatttctatgtcaaattcaatgaacagataccttttgaaaacctgctgggccacagagttttagtaagtgacagttattcctactttagagataagagaaagttataataatgagagtggttcaaggtcctacagaagtgagagagaaagagggacaggcataaaagcctagttaattactaacctttgcaaacacagagcttcaaactgaaaagagacaaataatgataataatgtcaatacctgatatttgacagtccagtactattttcataacacttcattttagtttttgctttgtgtttgggttttatgtaaccagaagaagaaaattcttgatggaatcacagaaaacttgagagttaattatagttcagtgtagtgaatgctttgatcctgaaggctgtgaaactgaatcgttttcattcagaaaatttctcatgtcaggtttttcaaacaaaaagaatgattagtaaactattctattacctttcattcccatagctctcctgtaatttgtaagactcaaatgatacacactgaaccttgggctgagatttaattttgtatatttgccaaagtacacagtagcctagtttccatagccatatctagcagataaatgtctctgaaaaaaaaaatcaggcttcagagacaatgggaggaaatcactgtggctcacacttgcggaccagcagtgggtgacaaaagtggaccctgggacacagacatgggtgcagtcactaattgacataattatttgagcatccaccagtcgagtagtcctgagtatctgtgacttttcctaatctgtagattaaaaaaaaaatactattctgatgtttaaatgctgggaagatggtgctaagagtataatggctcttagttcatccaccctttcattccatgccatcaccctatctctgccatcatggttataaagccatcactgaagtaacttcatctagtagtagggggcagggccacatcctcccagacactgtgatacacaaggtggatgcactcacttaacagcttagctgacaagaagttctgctttgccctttgcccctctctacctgctcttatgtactttctcactgcactgtcttgttacgaggaggacgggctaagggcagaaactcagcatgaagcccatgatgcacttgcaattttagctagatatacaagcaatttccttcctttctcctcgttgttgtggaatgatgtgcccttttgtccagaagggatacaaatgacattgtattcccatgtgtaacatttggaaaataaacattctggttgtcacagcttctatttcatcgcatattttcctgtgttatgtcatacttctgccagtgcaagccagaatgtgaagaatgcctaggggaatatttctcaagtgttttctaagcaacattaatcttaaaaatactttgcaaaaacagggcatttggtggtcagataaactttggaagtgctccatatcctatccctgtctttgatagtcaagatgcccattaacaaattaggagtcctaggaagcctggcaataaaaaaagactattgaacacaaaccaggatttcccagacttatgaccatggaaactattttcatataacacctataaagatcagagtaagagatgctatcacaggaagtgtttttagagatttaggttcacaaattaccaaaactactcgggaataaatagaaaattgaatagacctataataaggaaagagattgaattagtaatttaaaatctcccacagaaacaaacccagacacaaatggctttactggtaaattttaccaaaagtttaaagaagaattaataccaattctttataaactcttccaaaaaaatacaagaggaggaaagatttctcaattcatcctatgaggccagtattatcccgaataacaaaaccaaagacatcacaagaaaactacaaaccaatatccctatatagagatgcaaaaatcttcaagaaaatactagcaaactgaatctagcaatatattaaaaggtttatacaccatgactaagtaggatttattccaggaatgaaaggttagtttaatatacaaaaatccaataatgtaatgcaccaccatattaataggatgaaggaccaatagcacgtgatcatctcaatagacggagcagaaacatttgacaaaattcaacatccttttatgataaaaccactagaaaaactaagaatagaggagaacttcctcaacctaataaaggccatctacaaaaaacccacagctaccataatactcaatggtaaaagattgaaagctttccttctaaaatcaggagcaagacaaagatatttactctggccacttgtatttaacattgtactagggattttagccagggcacttaggcaagaaataaaaaaaaaaagaaaaattgtatttgcagatgatgtgatcttgtatatagaaaatcctgatactgactaaaacaattcatagaactgttaaacaagttcatcgaggttgcaggatacaagatcaatattcaaaaataaattttatttctaatacagtagcaatgaacaatctgaaatgaaattaagaaaacaacttcacttaaaatagcatcaaaaaacaataaaatacttagcaataaatttaaccaaagaagtgcaagacttatatacctaaagctacaaaataacattgaaataaattaaagatgtaaataaatggaggcatcctgtgttcatggacttaatattgttagggtgacaatacttcccaaattgaactacgtttttaacacaatccctttcaagatcctagctgacagtttttgcagaaattgggagattgatcctaaaatgtatatgtaaatgtgagagacccataatagccaaagcagttttaaaagagaagaacaaatttgaaggacccacacttcctgatttcaaaaattactatgaagctagtgtgctaaaacaatgtgtacttgtataaaaacaatgtgtacttctataaggataaacatataggtaaatggagtagaactgtgatttcagaaataaacccttacatttatgcccaattgatttttgtcaagggtagcaagacaactcagtgcaaaaagtaaaataagttatttcaacaaatgttgttggaacgactggatatccacatgcaaaagaatgaagctggacttcttctcacactatacacaaacattaactcattttagacctaactataagagctaaaaatataaaactcctggaagaaaaaataataaatctctgtgagttaggcagtgatttatttgatgatactgaaagcacaagcaacagaagaaaaaatagataaattggtcttcatcaaaaaaagtttttgaagtgttgtcatttgtataccatcaagaaactgaaaagacaatccatagaatgggagaaaatatttgcaaatcatatatctgataaaggacttgtattccgaacatataaagaactctaacaactcaataataaaaagacaaacaacccaattcaaaaatggacaaaggacttgaatagatactttgccaaaaaaaagatatgcacatgatcaataagcatctgaaaagatgatcaatgttattagttattagggaaatgcaagtcaaaaccacaatgagatatcccttcacacccaacaggatggctgtaataaaaaaggcagacattaataagtgttgtgcaggatggggcgacattggaaacctcacccattgctggtagaaatgtaaaatggtgcagccactttggaaaatagtttggcagttcttcaaaatgcagtgtcagagaaagaagagtgactactaataattaagggcttcttctcagggtaaagaaaatgttctaaaatgagatgtgatgatggttgcatgctctgtgaatataccaaagaccattgaattgtacactataaatggatgaattataggatatgtgaatgatatgttaataaagctgttaaatagctatttgtcctcacaatgtgatattttcatcttttttcacacttcctgtttctcctgagttaatggcatctgtgaaagaggaaaactatttttttaaaaaactctgtcaattatctttaattacacaaaagccgccagaagaactcattattgtttctatcttaactgttttgtttgtaatttctgtatataactagaatcccttggagaagatgacataaatttcttttaaaacccttcactgttggggccaggcacagtgggtcatgcctgtaatcccagcagtttgggaggccaagacaggaggatcacttgagcccaggagttcaagaccagcctgagcaataaagtgaggccccatctctacaacataaataaataaataaataaataaataaaaatacaaaaattagccatgcatagtggcacacacctatagtcccagcttacttgggaggctgaggctggagaatcacttaaacctgagagtttgagactgcagtgagctgtgatcacaacactacactccagcctgggtgacagagaaagatcctgtcaaaaaaaacaaataaaacccttcattattgatggtatggcatcatttatatctgagtttaatggttctatttttccagagataggactacacaattcaggcgcccattgcattggtagctgtacaagtcttgagacagaggctgagaatatgaagtgtcaggtcataagcaaacacataggaatgtgctgccagcccttgaaatggtgtgagaggttatagataatttggtattcataaacatggagcagaggcatgaaaaatgtaaaccataagactgtgccaatataataacaaatttgagggtggatgagttccccagggaaatgggaaaggggtgggcagaaggaaaggaaaaggctaaggatcagactctgggggattcagtggatcatagaaggaggggtcttggggaactaggctgaggcttgggacaactagcactatctgatggggtggtgtcagatgcagccaagtgctaatgggatggatacatcccttcatatctggctaaaaggagctcattggtgaccatagagaaaagggcatccacggacttttgaggatacaagtcagattttagaaaacagaaggatatgaaggcaatgggggcatcatttgagtgggactgttaaaagaatgcaaagaggatgacaaatgaaaaggacagacgtctccatgtagggtatgaaggctttttctagatagagtgaagctatgtatgtttgaagagagcttggatacctgcatttggaaagaggaagataatgcttttgtaaactattaatacaacacaaaactaccatcctatttaatgggtctcttcttagatgattttaaaatttaaagcattgttataaactatagaaaagaaatcatcaaaagattcatcttacaggctttgtcacaaaacaatgggactagaagggtctcaaggtattcatataagctgtacaggcatgtttctaaattaatctggaagataactcttttattttccagatgattaaagaaggctatttggcagcttccccagtgacttatgatactctaataacactcacttccttttgcttaactcaaatataaaagtacagagagatcaaactctccaacgtgccaatcaggaaatgctattttgcttactataaacttagcttatcttataggaccaacaataaagaattatgtgggagccataaactgccatctcctggcaatagtctcctgttattgtgaacattagtagattgaagatgtagtttctcaaagtcacttaagtgttttggggcacggttccagggacattgcgttctgcttgacataaacaatttctgctgtatcaaagacactgccctttagagattaaaggccactttggaaaactagtaagctttcagagtgtaggtacaaaatgaacttgaccattacactagatttttctcctttaattttaaagagcagtaatcatttggaagtattcccagagcccctgcttcaccctcttaggtcatgaaggcattccttactgagaagtggcttagtattgagaaactgctgacaccttggtgagaatactatagaaccacattttggagactgagagggtccacactgtcaggcagttctcactcagccaaaagacatcttccaggcccccctactgcactactttagggattcacacatgcaaaagtgttccccacatatgtgcatttctttttagcaggtttgggttttctgtgaaacgagaacagagaagccagaaactgataggggtgaaactaattgatgaaatcctttatcaacagcaaagaagtttatgttatgggcctttatggtcttcttgttgtttttttttttttttcttttgagacagtctcgcactgtcgcccaggctggagtgtagtggcacgatatcggctcactgcagcctccgcctccagggttcaagcaattctcctgcctcagcctctcgagtagctgagattacaggtgcctgccaccatgcccggctgattttttgtatttttagtagagacgggtttttttgtttgtttgtgtgtttgagacagagtcgtgctctgtcgctcaggctggagtgcagtgacgtgatctcggctcactgcaacctctgcctcctgggttcaagtgattctcctgccccagcctcccaagtagttgggattacaggcacccatcaccacgccctgctaattttcgtatttttttaagtagagacagggttttgccatgttggtcaggctcgtctcaaactcctgacctcaggtgatctgcctgtctcagcctctcaaagtgctgggattacaggtgtgagccaccgcctcttcttttaaaatattccgtggctcccatttctaaaatgattgccaggccagattttcctctttccttgaactctttacttctcctgccaccactgtttatcaaggctcagatcaaggggtctttggaccttgtgtgaaatcatactcaagttggcatctttctgtgaagaacttcgttaggaatgtgggacacattttgttgagttatatttataattcttttctttatgttcccagactattgagaatatttatttatttatttatttaagacagagtctcgctctgttgcccaggctggagtgcagtggtgcaatctcggctcactgcaacctccgcctcctgggttcaagcaattctcctgcctcagcctcccgggcaatatttatgttttttaataaaatttttttccaaagcaaagatcagttttgcattagactattccttgactatacgtacattttatggaggaaaatgtagatttttccagatttcagttaaaggaggaattataacaaggaccagctgctctgaggctgcccctgagctattacttaacctcagcccctctcttctccatagctatttttgttttctatgtaaaatgtctttgcccatttctctcagagtatgtattagcattttccaaagctgtttatgttccctcagtggtcgtcttccacccctgaagcttcttaagtctctatttttactccttagaaacagaaaaggtacatgtggaagatttctaagtttcacatttcaaagttctctttcttttgggaaagaaaaagttggaagtttaaaaatgcctctagaacaaacctatctccacattccatcaactgtataggaggcaggaaagcatgttttatgagcaaaggctttgggagcaggaaatttccattctatgatgtactagctactgccgctgggctttagtttccttatttataaaatggaaatatcaatagcgcttgccttcacagggttggagtgagcattgcacgagataatgcatatgaagggctttagccagtgtcaggcatagagaaggatctcaataaatgttagtgatgatggtggtgatgatgataaaggatttggagtctcaaaaagttgtattgcagcgttacaacataacattttcagataagaaacgagatcacatattctgccaaggttatttgaatttgctatgtggaagggaaaattacttctctgtcacttaatggctgccatatattcttactcagttaggaggtgtgcttacacgtgtttgtgatgtcttgtgtccttgccctgatggtcagaagttttgttttagccctttaaaaaatccaatacagctttcagtattctgcagtgcatgcagtagactttctacaagtaaatgttttaattaaaaaaatcaaattatcatgcaaattatactggtagaaaagattttggccttatgaacatttacaaggcattgatttttaaagtaaaataaattagcaaataaggccttataaactacctatttctggtctatttcctagggactcacctctactcaccattgcttctcttagcactttggctgttacacaatgaaatgaagttaatggtttctaataatgaatgagccatcttcatattagaggtcttggtaccaagcaatagaaaccaactcaggctaacaagagggaatgtactgaaaggaaatgagaggacctacagaactgatgtgaggctggaggaccacacttgaggatgagcaaagagcatgagagctctggcaagttaggggcaggaaccatagccatagtctttgtagcaggaagcatctgctcagcacttggccatggggaaagaaaacccacagtctactttcttctctatgtgggtgacccactccatggtcagagtcctctgagagtgtatgactggccaagctcagataacaggctcacagccaggctataccaggagctgggggtaggggtgtagagataaaaaaaaaaaatctatcattttctgtaatgggagctggtagctgggaccatcctgcctacacagctatacagaaaagaagagagacaatttcccagaaagaaaccaggatactaccaggaaaggggaatggatgctcggcaggcccacagtggcaagtgcctgatattccacactgctaataatctgattctttacatcaggcatagtctgtagtctagccagtctttattaagcctttgtagactttaaaacacagtataagacattccactttgctattcttgtcctatatgtggtctaaagacagtcctccacgtcatcatcctgctctcgtctaagtgggaacagctttctcaagagattagatgggaattcaggagttgagaatattgtagcaccagtattagatactaggatatgctacctttatttatgcataatttccaaataaatagaaataaatttaaagctattatttactgtaaattaaaaccagccaacacagcaccagggagattctgcacattttattaaattggggcctgtataggtataatgtattcagttgccatcaaaggtaatgtttctgacacagtagagggtctggttactttgcaagtcttaggttggttgcttttttgttgttttagaacaccattcaaatttaagatattactctttttgattgattctgtttgcttttatgttctaggggaaaacatatccatttcggggcgcctttccaccagtatggaatcccattgcatatttggattacaataatctgtggaggacaatagataacatggggaaggaggtaaaatgtgtgttcagtttgcacatgacccattactgaaataacaatggcaactgtttaatatccttccatagtgcagggaacattgctctggacaccaatgcatatcatttcccatgtacccaaactgcaaagttggtcgtatttccacttcacaaatggaaaaatgagtgcccagagattatgtaatttactcaagacctcatagcaagggaaccagcataccaacccactctcttatacaaatgcctgtgtgccttcaactctatgctactgagcatttatatgacatatttttgccaagtatctctacttacagttgtctgtctgtctgtaatgccattttagatagtaaaggagagaaggacttgctgccccaaagcttctttacttagtcttaggctctgtaatatcaatttgggacataaaatggttattagctttcaataacaatgatgatgataattgtcatcattataataattacatataaatttgtacatagacatatataatattatcactactattattgttttggcaatggcattaggacacagaatccaaagaactctaccccactccctgtctctatatagaattctatgccaatcacacatttcaacacagagaccaagagacccattttcagaggttttcatgagggccttcccgagaagaggtggcagttaccatcaaacctgagaggggacttcctttctctacagattccaactgatgcaccctgggaggctcaacatgctgacaaatgggacaaaatgaccatgaaagagctcattgacaaaatctgctggacaaagtaagtagacttgaccattcaaaatttactttttatcttcccttctcgtcttttatatcttgccttgaactgcagtgcttttcttaacaacttacagaaaaaaagaggaaacctagtaatctttcagtcaatagcaatgttgagggcacctcaaagtaggttagaacagaaaatgaatctaaaaattaagaaaagtgggtgaatgaagtagaacttcttttaatgaaagcattgtgtgatctgcaataaaatcaataattgtgttttcatattattgaaaggttgcctacaaaagcagtttgaaaagatattttttaaaaatgtggtacatttacaccatggaatactatgcagccataaaaaagaatgaaatcatgtccttttcagggacatggatgaagctggaagccatcattctcagcaaactaacacaggaacagaaaaccaaacatcgcatgttctcactcataagtgggaattgaacattaagaagacatggatgcagggaggggaacaacacacactggagcctgtcaggtggtgggaggagggagagcatcacgatagataactaatgcatgtgggtcttaatacctaggtgatgggttgatgggtgcagcaaaccactatggcacatgtttacctatctaataaacctgcacatgtactccggaatttaaaataaaataaaatggtaatcccatatagatgtggaatactaggaaatgagaggaaagctagtctgtagtaataaaaatgttcaattagaccatgtcttattagtttatgtggggcttactatgtgaaggcaccataccaggcactgaggaatgggggtgaacttcttaggaatagcccctaccctcatggagtttatgtttttctagcaggcaagactgaccttgagcacaattacataatgctaggagagttcctgtaacagggagaaccttacatggtctgagggtacaggaagcattctttgatgaagcaatctttaacctgaaactaaggagttagtgcatcaactaagaatgagccatcggggcaggggggagtcagaaaaggtgaacagtgtagggcgatggtatcttccaggaatgatacacagggacaggagagagaaaggaagaatggatgaagttggggggatagtatctgccaggaataagtcatggggcaggagaaagacaggaagggtggatggtgtggtagaaatcgtaccttccaggagtaacccatagggttgatagtagtggggcagatggtatgatctaagaatgacacacagtgtcaaagggagagagggaaggttggacagtggtggtgggaggagggaatgatatcttccaaaaattacccacaagggcaagaagggagaaagggataatggagaaagatgggtggtgttttaggaaagacccacagaaacaaggcgagatggggactggaagggtggatggcattgggggattttgtcttctaggaatgagccacagggattagggggagataggaaggactgatggggcaggaagatagtatgttccaggtatgatccacaggttcagaggggagaaaagtatagtggatggtgtttgccatggatgaaccaccaggatagtgggggagacagaaaaggttgatggtgtggtgggatggtatcttttatgaatgacccaaaggggcaaagggaaggcaggaaagatggatgttgcggggatatcatccaccaacaacccagaggtgtagtggggagacaggaggtgtagatggtattaccaggatatgtcttccagaaatgagccacaaaggcagggataagataggaagagtgaatggtgtggcctggttgcatcttccaggaatgcccccacagtgttagggagtggggaacaagaatggatccctgtgggggtatggtatcttctaggaatagcccacagagtcaaggggaaacaggcaacattaggtagtgtgtgtgtgtggtggggaaatggggcgggggtggggtggggagaatgaaattttccagctatttctctctctctggggagagaaagggaaggttggtttgtgtggatggagatggtatcttctaggaattacccaaaccagaagggtggatgtcttaggggaaggggaattttccagcaatgacccagagggatggtggggagacaggaaacatagatggtgaggcaagatgatgtattccagaaatgacccacagggcaaggggtagatacaaaggtggatggggtgagggagatggtctcttccagttatgacccacaagggtagaggggacacagatggtgtagatcatttggcaaaatggaattttccaggaatggtccacagggaagagggtacataggaaggtttggtggtgtggcaggatggtatcttccaggaatgagctacactggcagtggtaggggggagaaaggaagggtggatggtgaggggtcatggtttcttccaagaatgactcataggattgtacaggaatgacccagaggggtagcgcagagagaggaaacatgactggtgtggcaggatataccttccaggaatggtctacaggagctaggggatgcagggaagatgggcttgtttgcaggcatggttcttcctggagtaacccaaagggtcaggggtgagacagcaagggtggatattgggccgcggataacttccagcaatgaccaaaagagatgggaggagacaggaagtgtggaaggtgaccaggatggtatttccaggaatgaccctcaagagttgggagagacaagtaggatagatgatttgatggagtggtatcttccaggaatgaaccaaaggggcagaagaaaacatggtacattgtgtttagagagatggaatcttccaggaatgagttaccctggtggtgttttcggggacatggaaagggtggggatagtatcttccaggatgacccacaaggccaaggggggagacaggacagggtggatactgtgtttgtagggggagggcatgttacttctcagggatgtgacacaggcactgtggggacacagagaagggtagatgttttgtggaggaggtggtctcatcccgaaatgacccagagggtttagaaaggtgtagcaggatggtatcttccaggaatgagccacacggttggtggcgggggaagatgggtggtatagagagatggtatcttccaggaatgacccacaggggcaagggggtgacctgaagggtaaaggttgtgaagggggatatcttccagtaatcacccaaaggggtagggggagataggaagaaaagatagtgaggcaggatgatattttctaagaatggtcttcagaatgtgtggggttaagtaaacaggaaaggtggatggtgtaggaagatcgtatcttccaggaatgagccaccgaggttggggtgagacaggtaggtggatggttttgtagaatggtattttccaggaatgagccacagggcagggggtagatataaaggatggatggtatgggggagatggtatcttccaggaatgaactacaaaattgaggaaggaggggaatgatggatgagctaggtggatgggatctgccaggatggcccacagagccaaaagaaagacaaggcagagtggataatgtaggggaaatagtatcttccaggaatatcacacaggcaatgcagggaggcaggaaagggtagatgttttggtgagggagtggtatcatccccaaatgacccagagtggtagaggggagataggatagttgaatgacaggatagtatcttccaggaatgagccacggtgacagtggtgggggtgggagacagtaagagtgtatgtggatggtatcttccacgaatgacccacagaagtcagggaaataagtttaggcaaatggtatctcctaggaatgtgccaaaagggtagtggtggggggagatgggaatggtggatattgtggaagtgatatcatacaggaatgagccagagggggtagtgaggagtcaggaatcatgaatggtgtggcaggatatattttcaaggaatgacccacatgggctaaggggacacagggaatgttggcctgactggggacatggtatcttcctggagtgactcaaagggttgggggaagataagaagggtggatgttgtggggaatacattccaacaatgacacagaaggatggggcgagacacaaagtggttaaggtgaggcaggatggtattttccaggtatgacccacaaggttgggagagtaagaaagatgagtgatggtggggggaaatggtatcttccaggataaccctcaggggtaagggtaaacaggacaaggtggatagtgttgaaggggttatatctttcaggaatgtgactaagtctctggggggaaacagggaagggtagatgttttgtgagggagtgataccaaaatgacccagaggaatagtagggaaataggacagttgcatggcatgtcaggatggtatcttccagaaatgagtcacactggtggtggcggaaagagacaagaaaggtggatgttatcattcaagatgatatcattcaagaattacccagaggaataggggagagacaggaagcctgactggtgtggcagggtatattttctgggaatgagccacaggtgtgggagaagacagtcagggtagatggtttggtggaatgaaatcttccaggaatgacccacagggtcatgggggaaaattgaagggtagacattgtggatggagatatcttccagcaatgacccagagggatgggggagacaggaaatgataatggtgcagcaggatggtatcctccaggattgagccacactggtggggttgtgggggtcatggtatcttccatgaatgacccactggggtcgagggaagactggtagggtagatggtttggcggaatgttattttacaggaatgacccacagggcagaaggtagataggaaggatggatacagtagaagagatggtatgttccagtaatgagctatagaatttggggagggggggaatgatggatgaggtagggagatggtatcttccaggatgacccacagagccaagggggagacaaggcagactgtataatataaggggtatagtatctttcaggagtgtgaaccaagcactgcaaggaggcagggaagggtagatgttttaggaagaaggtggtatcatcccaagataaccaagaggataacaggaaaatagaatggttagatggtgtggcaggatggtatcttccagaaatgagccaaatgacagtggtgggggtggcagaaggtatgggtggatggtatcttccaagaatgattcacagaggcagggggtggcagaaggtatgggtggatggtatcttccaagaatgattcacagaggcagggggagacagggtacattgggtttagagagatggtgtcttccaggaatgagacacctgggtagtagtgggggagacagggtacattgggtttagagagatggtgtcttccagtaatgagacacctgggtagtagtgggggaaaacaggaagggttgaagtgtggggggatgatatcatcctggaatgagccagaggattagtgttgggggggttatatcaggaatgtgacaaaggctctgcggggaaacagggaagcctagatgttttagggacggtgtggtatcaccccgaaatgatcagaggggtagtggggagatacaacggttgcatggcgtggcaggatggtatcttccaggaatgagtcacactatgggtggtgggggagaccatcagggggatgttggctggcatggtatcgttgtggaatgacccagagggacagggcagagagagaaagcatgaatggtgtggcaggatatattttccaggaatgagtcacaggggcagtagggaaacatgaagagtagatggtgaggtgggatggtaccgcccaggaatggtccacaggagctaggggatgcagagaacattggcttgttggcaggcatggtttttcctgtagtgacccaaagggttgggagtggtgggggagataacttccatccacgacccagaggagagggagtagacaggaagtgtggaagatgaccacgatggtatcttccagggatgacccaaaggggcagagggacacagggtggattgtgttttgagagatggtgtcttctaggaatgagccaccctggtggtgcctggggggacacaggaagaggtatgtggagatggcatcttcctggatgacccaaaggggaaagggggagacaaggcaaggtggaagtgttgggggaggtgtgacagtatctttcaggaatgtggtatagtcactgtggggaaacagggaaggctagatgtggttatatcatctcgaaatgacccagaggggtagagggaaataggaaggttgcatggtgtggcaagatggtatcttccaggaatgaggcacactggcagtagtgggggtggagacaggatggaaggtggatgtggatggtattttcctggtgtgacccgcaggggcagtaggtaacagtggattgggtttagagagatggtgtcttccagcaatctgccacaagggtggttagaggtccgggggataccggaagggtggatggtgtagcaggatggtatcttccaggaataaaccctggcaggtgggtgttttgggggaattgtgtcttccaggaatggaccataggggtagatgggagacaggtagggtatgacagaatgatattttccaggcatgacccacagggcaggggatagagaagaaggatgaatgttgcattggagatggtatcttccaggaatgaactacggaattggggaagcgggggaatgatggatgacgtaggggaatgggatcttccaggatggctcagagatcccagagggagtcaaggcagggtaaataatgtaagaggggatagtatctttcaggaatatgacacaggcactatagggtagacgttttggggaggaggcggtatcatcctgaaatgacccggaggggtagtggggaaacaggaaggttggattgtgtggcaggatggtatcttccaggaatgaaccacactggtggtgcttcgagggggacacaggaccggggatgttatctaacaaaatgactgacagggaagagtagatagttctgtgtaggggtatagtatctttcaggaacgtgacacaggcactgcggggagacagggaagggtagatgtcttagggagtgggtggtatcatccagatatgactcaggagtaggggggaaatagaaaggttggatggtgtggcaatatggtatcttccaggaatgaaccacacaggtggtgactgggggaggcaggaaaggtgggtggtgttaggggatggtgtcttctaggaatgacctacaggagaagggggagacagggtggattggctttggagagggccacaggtgcggtggctggggagacaagaagggcagatggtgtggaaggatggtatcttccagaaacaacccacagggatacagggagacaggggtttagagagatggtatcttccaggaatgagccacatgggaagtggtagggagagacaggaaggatggacgttgtggggggtggtattcgggaatgacatagctgggaatgggggaaacaggaaacaggaatgctgtagcaagatacatcttccaggaatgagccacgagggcttgaggggagacattatgattggatagtgttggtacatggtatattcaaggaattagccataggtttagaggggagacagcaagagtagatggtgtagagaggatgatatctgcctctaatggcccacaggtgcacgggggagataggggagattagatagtgttgggggaattatatcttccgggaatgtgacacaggctctggaagagatggtgaaggtggaatttggttgtggggtgggggaggggggaggtaatgatatccccaaatcacccatagtattagggtggcaataggaagattggatggtgtaggcagatggtatctactaggaatgactttcagagtcagtggggacatgtgaagatagaaaatgtgtttgcagagatactgtcttctaggaatgagacacacttgctgaggggaggcagggaagggtgtatgttttgggggcaatggtgccatccagaaatgaaccagaggagtaggggatagacaggaagagtcaatggtatgtggcaggatgctaccttccagaaatgacccacaggtatgtggggagataggaaaggttggatgatgtgggaagaatggtatctttcaagaatgactcaaagttctcaggggaatggggagacagggacgggtagatgatgtacagtgatggaatcttctaggcatagaggacagggacaagcttttgtgaaggccttgaggtgagaaggatattggcatgtttgagcaactgagtggacagtgtagctggaccatagtgatgacaagagcaagtggtataaggggagtttgcaggactggtctagaggctgatagtgcaggatctatgggccacattgaatatttgtcctttctccactgaagatcgttgaaaggttttaagcagagggttttttgagtttggcacttttaaaagccctcattggctatagtgtggaggatacaagaggagatgcaagatgaccaagtaggagccaccactgctatagcctggacatattggtagcctggaccagggctgtggcaatgaagatggagaggagaagatgggtattgaaagaagcttattgatgcttagagagaacctggattagcatacttggagctaactcataatttctttttttttttttaattatactttaagtgctggggtacatgtgtacaacatgcaggtttgttacataggtatccatgtgccatgttggtttgctacacccatcaactcgtcatttacattaggcatttctcctaatgctatccctccctgagccccccatcccctgacaggccctggtgtgtgatgttcccctccctgtgtccatgtgttctcgttgttcaactctcacttatgagtgagaacatgcggtgtttggttttctcttattgtgttactttgctgagaatgatggtttccagtttcatccacgtccctgcaaaggacatgaactcatcctttttttatggctgcatagtattccatggtgtatatgtgccacattttcttcatccagtctattattgatgggcatttgggttggttccaagactttgctattgttaacagtgctgcaataaacatatgtgtgcatgtgtctttatagtagaatgatttataattctttgggtatatacccagtaatgggattactgtgtcaaatggtatttctagttccagatccttgaggaatcaccatactgtcttccataatggttgaactaattgacactcccaccaacattgtaaaagcgttcctatttctccacatcctctccagcatctgttgtttcctgactttttaatggttgccattctaactgtcatgagatggtatctattgtggttttgatttgcatttctctaatgaccagtgatgatgaacattttttcataagttttttggctgcataaatgtcttcttttgagaagtgtctgttcatatcctttgcccattttttgatagggttgtttctttcttgtaaatttgtttaggttcgttgtagattctggatattagccctttgtcagatgggtagattacaaaaattttctcccattctgtaggctgcctgttaattctgataataatttattttgctgtgccaaagctctttagtttaattagatcccatttgtctgttttggcttttgttgctattgcttttggtgttttagttatgaagtctttgtccatccctatgtcctgaatggtattgcctaggttttcttctagggtttttatggttttaagttatacgtttaaatctttaatccatctcgagttaattttcgtataaagtgtaaggaagggatccaatttcagctttctgcatatggctagccagttttcccagcactatttattaaatagggaatcctttccctgttgcttgtttttgtcagtttgtcaaagatcaaatggttgtagatgtgtggtgttatttctgaggcctctgttctgttccattggtctatatatatctgttttggtaccagtaccatgctgttttggttactgtaaccttgtagtatagtttgaagtcaggtaacgtgatgcctccagctttgtcctttttgcttaggattgtcttggctatgcgggctctttttttggttccatatgaagtttaaagtagttttttccaattctgtgaagaaagtcagtggtagcttgatggggatagcactgaatctataaattactttgggcagtatggccattttcgtgatattgattcttcctatccatgagcatggaatgttcttccatttgtttgtgccctcttttattgcgttgagaagtggtttgtagttctccttaaagaggtccttcacatcccttataaattggattcgtaggtatgttattctctttgtagcaattgtgaataggagttcactcatgatttggctctctgtctgttattggtgtataggaatgcttgtgatttttgcacattgattttgtatcctgagactttgctgaagttgcttatcaacttaaggagattttgggctgagacgatggggctttctaaatatataatcatgtcatctgcaaacagagacagtttgacttcctctcttcctaattgaatacctttatttctttctcttgtgtgattggcctggtcagaacttccaatactatgttgaataggagtggtgagagagggcatccttgtgccagttttcaaagggaatgcttccagtttttgctcattcagtatgatattggctgtgggtttgtcataaatagctcttattattttgagatacgttccatcaatacctagtttatggagagtttttagcatgaagggctgttgaattttgtccaaggccttttctgcatctattgagataatcttgtggtttttgtcattggttctgtttatgtgacggattacgtttattgatttgtatatgttgaaccagccttgcatcccaggaaggaagctgacttgatcttggtggatacgctttttgatgtgctgctggatttggtttgctagtattttattgaggattttcgcatcaatgttcatcagggatattggcctgaaattctctttttttgttgtgtctctgccaggttttggtatcaggatgatgctggcctcataaaatgagttagggaggatcccctctttttctattgattggaatagtttcagaaggaatggtaccagctcctccttgtacctctggtagaattcagctgtgaatccatctggtcctagattttttttgttggtaggctattaattactgcctcaatttcagaacctgttattggtctattcagagattcaacttcttcctggtttagtcttgggagggtgtatgtgtccaggaatttatccatttcttctagattttctagtttatttgcatagaggtgtttatagtattctctgttggtagtttgtatttctatgggattggtggtgatatcccctttttctttttttattgtgtatatttgattcttctctcttttctttattagtcttgctagtggtctattttgttgatcttttcaaaaaaccagctcctggattcactgatatttttgaagggttttttgtgtctctgtctccttcagttctgctctgatcttagttatttcttgtcttctgctagcttttgaatttgtttgctcttgcttctctagttcttttaattgtgatattagggtgtcagttttagatcttccctgctttctcttttgggcatttagtgctataaattttcttctacacactgctttaaatgtgtcccagagattctggtacgttgtgtctttgttctcattcgtttcaaagaacatctttatttctgtcttcattttgttaattactcagtagtcattcaagagcaggttgttcagtttccaagtagttgtgcggttttgagtgagtttcttcatcctgagttctaatttgattgcactgtggtctgacagacagttcgttgtgatttctgtacttttacatttgctgaggagtgttttacttccaattatgtggtcattttagagtaagtgtgatgtggtactgagaagaatgtatactctcttgatttggggtggagagttctgtagatgtctgttaggtccacttggtccagagctgaattcaagtcctgaatatccttgttaatttttgtcttgttgatctaatgctgacagtggggtattaaagtctcccaccgttattgtgtgggagtctaagtctctttgtaggtctctaagaacttgctttacgaacctggatgttcctgtattgggtgcatatgtatttaggatagttagctcttctcgttgcattgatccctttacagttatgtaatgcccttctttgtctcttttgacctttgttcgtttaaagtctgttttatcagagactaagattacaacccctgctttttttttttgctttccatctggttggtaaatattcctccatccctttattttgagcctatgtgtgtctttgcatgtgagatgggtcttccaaatacagcacaccgatgggtcttgactctttagccagtttgccagtctgtgtcttttaattggggcatttagcccatttacatttaaggttgatattgttatgtgtgaatttgatcctatcattttgatgctagctggttatttttcccgctagttgatgcagtttcttcatagcatcaatggtctttacaatttggcatgtttttgcagtggctggtactggttgtcctttccatgtttagtgcttccttcaggagctcttgcaaggcaggcctggtggtaacaaaatctctcagcatttgcttgtctgtaaaggattttatttctccttcatttatgaaacttagtttggctggatatgaaattctgggttgaaaattcttttctttaagaatgttgaatattggcccccactctcttctggcttgtagggtttctgctgagagatctgctgttagtctgatgggtcttcctttgtgggtaactcgacctttctgtctggctgcccttaacatttttttccttcatttcaaccttggtgaatctgacaattatgtgtcttggggttgctcttttcgaggaatatctttgtgatgttttctgtatttcctgaatttgaatgttggcctgccttgctaggttagggaaattctcctggataatattctgaagagtgttttccaagttggttccattctccctgtcaatttcaggtataccaatcaaacatagatttggtcttttcacatagtcccgtatttcttggaggctttgtttgtttcttttcactcttttttctctaatcttgtcttctcgctttatttcattaagttgatcttcaattactgatatcctttcctccacttgatcgattcggctgttgaaacttgtgtctgcttcacgaagttcttgtggtgcatttttcagctccatcaggtcatttatgttcttctctacactggttattctagttagcaattcgtctaaccttttttcaaggttcttagcttccttgcattgggttagaacctgctcctttagctcggagtagtttgttattacccaccttctgaagcctacttctgtcaattcatcaaactcattctctgttcagttttgttcccgtgctggcgaggagttgtgatcctttggaagagaagaggcgttctggtttttggaatttttcagcctttctgcactggtttctccccacctttgtggttttatctacctttggtctttgatgttggtgacctatggatggggtttctgtgtggatgtcctttttgttgatgttgatgctattcctttctgcttgttagttttccttctaacaggcccctcagctgcaagtctgttggagtttgctggaggtccactccagatgctgtttgctggggtatcaccagcagaggctacagaacagcaactattgctgcctgatccttcctctggaagctttgtcccaggggggcacccaccagatgccagccagagctctcctgtatgaggtgtctgttggcccctactgggaggtgtctctcagtcaggctacacgggggtcggggcccacttgaggcagtctgtccgttatcagagctcaaacactgtgctgggagaaccactgctctcttcagagctgtcaggcagggacatttaagtctgctgaagctgcacccccagctgccccttcccccaggtgctctggcccaaggagatgggggttttatctataagtccctgactggggctgctgccttttgttcagagatgccctgcccacagaggtggaatctagagaggcagtaggccttgctgagctgtggtggggtccgcccagttcgaacttcctggtggctttgtttacactgtgagcataaaactgcctactcaagcctcagcaatggcagatgcacctctccacaccaagctcgagcattccaggtcgatatcaggctgctgtgctagcagcgaggatttcaagccaatggatattagcttgctgggctccatgggtgtgggacccactgagccaggcaccggagggaatctcctgatctgccagttgtgaagactgtgggaaaagcgcagtatctgcgcaagagtgtaccgttcttcctgggacagtctctcacagcttcccttggctaggaaaaggaaatcccccaaccgcttgcacttcccaggtgaggcgatgccctgccctgcttcggcttgccctccatgagctgcacccactgtccaaccagtcccaatgagatgaaccaggtacctcagttggaaacacagaaatcacccaccttctgcgcggatctcactgggagctgcagaccggagctgtttctgtttggctgtcttgctggacccttggctccttttcaactcataatttcttaagcaggagaaaatgttagtttctccaagagttaaagaatgcattccttcagaaattgaatccttgagagtttttttcaattgcaacagaaaaactttctgaacacactaaatcgtgttgtaaaaacatgacattctctgactcctgtacatattgacacctgacttccacttttgttctatgaacaggactgctaggcggtttgcttatctttttgtgaatatcaatgtgacctctgagcctcacgaagtgtctgccctgtggttcttgtggtatgtgaagcagtgcgggggcaccactcggatattctctgtcaccaatggtggccaggtatggtgtgtatgtgtctgttctgaaacaagagcttcatctgtgattttgctttctcccagggcagtgtctttaatagttgcttcaggattttgaaacatgaataattagcagcatgaaatgatctcaaaagattttctgaaaaaaaaatttctcatttccttttgtcactcctgaaaaggagttcacagataaagaatgtttcattttgaattaattaggttttgagaattaagttccttccttttggtagcaggtaaaattaggctgtttatgtaggagaagctaaattcctaaaataatttccaaaaaattctagaaattgtacaattattgtacttaaaatcatctctgttctagacacaaggtttctgtcccatctgtttatcagagtgattcttttatgttaactgctacagaagggaagtgactgttcttccttctaattcacgcaagtgattatggccactcttgcaatagtaaattctgccttttggattcttagtttttgctacccacttgaatttgcccagtttccatatcatttcctttattaataagtgaattcatttcgttcattggctggacacatggcgaagccagaatcctaattccccagactctgagattctctgcttcaaccctttctgttatccaaagagaatgggtatctctgttctataaatgttgtgcttggatggtatgaggtttaattagtagcagtttacttctaacttaggttctctgagttcctgaattctgagtgcacagtacaaggtatagagtctttctctgccaagtgaattattcttctcctgaggagatcaccggaaatccccaagttcttgtgacaccaagactcattgcccatttgacccttagccttgacaaatgcaggacagttgcattttttaaatgtctttacctacaggcagagatgacagattactccttttagccagtattttactttctgaggtattttgatttacatttgatatttgtttccttcattcagaggagccaggatacttctagccaaattctacatgaccttttggaaaatatggttcagatgattaatctcaaaccatggtcacaatatttttataaagaacttaggcttatcctgtaatttaattcaacaaatactagacctggaggggtggacagtgaacaagacagaaacagttcgtggtctttccaccacactaaaactcaaagtacctcttagaaaacagaccagattataagttaaatggtctgggtttcttgaggaaagacaaatcatgaatttaggtctgaaccactctgggaattttttttcctttttttaatttaatttttgagacagagtcttgctttgttgcctagcctggtctccaactcctgggctcaagcagtccttccgcctcagcctctcaaagtgctaagatcacaggcatgagccaccatgcctagccaggaatattttttataaagaactttggtgttgttattaaaacagtagccagttacaaaagtgcaaaaatcactgcgtggctgcttatgcagttttctggaggagtatgattgaggaatctgttaggaatcttctggctgggcgcggtggctcacacctgtaatcccagcacttttggaggccaaggagggtggatcacctgaggacaggagtttgagaccagcctggctaacatgatgaaaccccatttctgctaaaaatacaaaaattagccaggtgtcatggcacgcacctgtaatcccagctactcgggaggccaaggcaagagaatcacttgaacccaggaggcggaagttacagtgagccaagattgcgccattgcatgccagcttgggcaataagagtgaaactccgtctcaaaaaaaaaaaaaaaaaaagaatcttctataataggctaaaaatatccttctggttcttaccaaaagcattgtgttaaggacttaccttcttagattaagctggaaacatttccatggtgatcgtagcagaaggcagagggtagagcacttctggtcttataagggccgctcaagagaactatttaacaatatctaaaggagcaagcagatgcttagccttcaccctctgcctctgccttgaagcttccagatagttttgcaaaaagttactcaagatctgatattccgaatcttttttttttttttttttttttgagacggagtctagctctgttgcccacgctggagtgcagtggtgcaatctcggctcactgcaacctccgcctcctgggttcaagtggttctcctgcctcagcctcccgaatagctgggattacaggcacgtgccaccacgcctggctaatttttgtaattttagtacagccacagcacccggcccttcttcccattcttagaacatcatttggtggtgactagtaggactagtaggacgtgactatccctaaaagcaccctgtaactttgtctataatatggctctatctgcatccttacctgcctggacaacctcagcccagaacacaggaatcaaaggaaattagaaacttcatcctctggaataagccctgtgcctgccccttctcagggctccctccacaccctgcactctttgacatttgaagcccacagacttgctgatattccccttggtcagggcagcattggcatagtggaacatttcttcgggttctgtgatttttataaacttgtaatggcttttctttgccagaagctgtgcagggaatgatcattgaattgtcttggtcaactctgcctctgtcctaatgaagtcttctgacagttaagtgtgcagacgttagaggtgtggcctgtgactttctggaggttttctaatcagtagccagtaggattttccttccttgggctttcataatgtttcctttcttacctacctcctcctgtaggaacggaagtttgtaggtggatctggtcaagtgagcgaacggataatggacctcctcggagaccaagtgaagctgaaccatcctgtcactcacgttgaccagtcaagtgacaacatcatcatagagacgctgaaccatgaacattatgaggtaactcagtttagtcaaaaggagcatatagtaaataggccttgtgtcttttgcagtttctaaccagatataattcaagcagtagcataattaatgctgacatgtttccgcctcagtcttccaaattaccagccttggttgacctaccttgatctgttttgttgcctcacagttgcctcattttctcattttgtatgtttttactgctcaatgttgtttagaagtgataaagatgatttttcacgcctgccacaaagactgcagctcacatttgaggtaatattttgcttgtgtgtgttttagtgcaaatacgtaattaatgcgatccctccgaccttgactgccaagattcacttcagaccagagcttccagcagagagaaaccagttaattcagcggcttccaatgggagctgtcattaagtgcatgatgtattacaaggaggccttctggaagaagaagggtaggctgctattattcatgtttaaactgtattatatgaagaaatcacagtcttttaggattattgaacagaaggtattgaacagaaacaaagtattttcaaactggtagaaaaaggattagaaatcttggtctgtcaatttcctcatatccttggccacacataatgaccccaagagcacttgttggcaatgggagggaagaaggagatcacatcagtcataaggccaccattgccctgactcctggcatctgtcctgcttcttactttttatgagcagagtgaggtcaacaggcaccatggaaagagcactgcgttgaagttacacattccgggacttcgcttgcttgctagcatcagtctgtagctgtaaagtggtgacagtaatacctaccactacggtgttgtgagaattaaatgaggcaggatcttggacttagaaagctgcccagatatggtggctactgttgataagcattctggttatactcatcggattccctcctcccacctcttccctggattgggtcattccctccaatgcagcccttctctttcctcatgtatgctaggagccagggttatcttaccatttttgtcatgcattggctggtcataagccctttatgtaaaggtgatggagatgggtcattttctgtctgtgggtgaatagacatccttatatattcagtgtgtgtatttaacaagacatgtagggttggggccaagaccaagagtttaagtttttacttcctcttaaaaaatagtttatatatatttatgtgtgtatgggtgtctctgatgagcttgatctcgatctcccattgatttttctcctggttaagattactgtggctgcatgatcattgaagatgaagatgctccaatttcaataaccttggatgacaccaagccagatgggtcactgcctgccatcatggggtaggttagagcagggtgttctgcattttccaaattgtgttgatgtattggtgtggatgctgtcaaagtatattactttggaattaagttcaagcaatgatgaataatgctatcaaaatatataatgtttccatgtgttaaaatattgcagtaatgtttcgtatgtagcacaagaatactgggaaactttactaaaattgacaccattttgaacttgtacccatgtatgtctttctctcatacaaagcttacgtgttgaggatggagtgaaaaaaagcagctagacaggcagtatggtagccacccctgcctacaggcagaatgtccacagccattctgaaatgagaactaaccgctttattctataaaaacattctaaatgtggggtttctcggttttatccttttctccattccagatatctgctacatagcaaatgttagttgttaccctgagatataagacagctgaccaattaggaggcccagttcagaattgagccaggccttgattggatggcatggcagtttttctggtgggtcactctagttatccttcaccagtggtgcttcacttaacctctaaagtgtgcggatgacccagggcctggttctgtgtagggaaaatgagagcttttcccctctcttctcattccggcacatagctgtcctactcgttgggggctggggagtccagagaaggaagtggtgtccccacaaatgaattgctaaggagttccacagcctccctcttgcctgccttttggcctcctcaaaaactatacaaataaaaggcgatttattctaccacactgtaacaaaagaacatagcttcagtagcaatcaagtgacttttagagaccagtggtctcccctttacccctaggaaatgcatagctcttgctcagagggaaaggtgaactcatgcacatcatgtcattgaaggaaaattacaaaggcaaaaggagcagacccacatcccagggaagttagaaagcaggttgtgctgctggttactaatgagacattttataaccacttctctcattgtaacatataagaacaccagcctccctgagaaaggcaggtgcttacaacataatgactgttggaataacacatcctcttcatctctaaccctattgggcagaagaggatataggttgtttgggtagtttgacatcatcttctatatgccagagaaaagcaggaggttcaggtacaggtttcaggagaatgtcggttaagacaaatccaactatgaatggaagagcaattgatatttttcttgccctgggagttagatatagtgatgtcttctgctgtttttgggctttctttttttttttttttttttggaagtggaactcaatattttaatgattttacttaagataaatagtataaaaggaaaatgttaaacggttgtgttctgtggacagtggggctaaaacaaatataaaataataataattggttatagaggaccaagtacagaagatgagagtttccttggaaactggggaataccaaaataatctgtttcttaacttggcgatgtagtcttaaaaattaaagctaccatttattgagcattggttgtgggtgcaagtttttatgtgtacaatgcttttgggctttcttcagctttattattaactaggttagggctcaaataaccttccaggtgttaatggagttatttaggcaattcttagaaagtgatattctaatctctttcatcttgacacttgcctccaccctgctctttgctgatggccacagccacgaaaaccttgaagataggggtggtaattgcccagcactgtgtttgtaataaacttttggaaactagaaaggaccttgtactttagaactgtgaaatgtttccaacacaaagccagcatgtttaatttcctcaataaaacaccaaagtaagttaaagcttatttatccatagttgggattagatcaaagagattatttcattcatgacttgagatttgacagaaataaccaacactaactgccctttgggaagggaactgtaaaaagtatacaagacaagttgactaaaaatgttttcagataaatcatttaatcttttatcagatattgatgattaaaaaaaactatatacatctaaacttactgattcttgcataaacccagaatctaactaaaataattaataacaagctataacttgaggtgttaaatcatgcaaaattatgactatatcccataaagttcaatagttcagatttcctaaatagtccacagctttctctgaaatactattctctacattaacatacatctttgcttctcaaagtgatctcaaataacagccctaaaggaactgccaatccaatttgaggaacactttaatttgtgggtagggagaggaggaaatatctgttttttgcactgatctacctgtccttttggtcttgaataaaagaaatacaaatttaaaaattttttaatggaaaaataatttcattgtcctttagctcatttggatttttgaaagctttctaataatagtataactaaggacttcatgtcacaattcaattcttttaaatatacatgcagttagtaatatcagtataataaatagaatatatttgattaaaggggagcaggcaggttataactgagttttattgagttactttatttggggactatattaggtcagtttccagggaagctgactcagagctggagatctgggtgctggaactttattgggaagtgctctggggatgactacctatggcagaaggattatgcggaacttgagctccaatgttgtcccaacaaaggcctctgccattcccttggaagttctggagctgggtggcccttcagagttgtcttcaaccgcatctaggtcagaacaactctagggaggggtgggaccttgagcgaggcattctctgctgccccgtccaattactggggaaggtttcagctgtgaggtaagagtaacgagtgcctggtcccaaagggagcctggggggcccaccgtggcctccactacagacacatgtttatatttgtttttccagctttgataaagtatttggcagaaggcaacagtcattaccagaataatcatttagcacaacattcattcattcaacatttgatttcctactatatgccaaaaaccatgttaaactttagaagtaaaatattgaataggaggtcacctgtcgtgtaggggatcacagcctagcaggggttttggacacacaggcagaccaaagacaatatggcatttgccctactagaggaggagggtctgagagagttcatttcatgctgaatagctacaggttaagaatacttcagaaagaaagggcagctcttaaaataaacagctgtaacctgatcattcaatgtaacctctctctccagcttcattcttgcccggaaagctgatcgacttgctaagctacataaggaaataaggtaagaatttataactgaaaaatagatgaaaaagttagctttgtattttgtttttgcactgacagtagtagaataacatgaggaaaaacacagtacttcacaaatattctcaaaattccaacaaaccaaccttttgtattttgctacagccctcttgacctagcccttgcccgtgtgcatatattaattttacatgttcgtgtttattttacagtagttaagaggtaggatttccctgagagatggatggataaaaatcatagaaaatattagctgtgaaaaatgctgtagaaaccgaatcccaatcctctttcaaggccataatctttttctaagattctctgacatggactttctaaaaagtatattttaacctgtagcaacttttgtacatgaaaatattcactactgcttatctgggacacagttctgatgttcccttatctgaaagcttcctagtataaaatttattttaggacagtggtttttttttttttctttctttctccctttctcttcctgtcatggtatatttgttttgttttgttttggaatcctttgttcaattaaagtcttacctgaagaggtaagccttttaacatcagagttatttggctgttggagggttgcctctgggtagccctaaatcctctgctagcttttaaagaggtccaatacatacacaaaaatatagacttttctctgaatgtaatttaaaaaattaaacagctaacccattagcagccgttgctttgggagttactctgatgactttagaagtgggggaaaggctgcagaatgagttcctacatgtgcacacggatttgtttatttgaatctcatggtttgcaggtaagctttacatggaagaaactcccagtttcaattagcaggttcttctctgttcactgtaagtggtaaatggttgaatctcaacaatcatgggattcaaacaaccatgagattgtggaatctcatggttgttaaaaataaactctactcactcaatggaggagggatttggggtccagtgatggggaatgatttgttcaagcctccatagctagtgtcttagtgcatttgtgatactgtaacaaagtgcctgaaactgggtaatttatgaagaatagaaatttatttctcacagttctagaggctgggaagtccaagattatgatgccaacagattcaattcagtgtttggtgagaacctgttccgtaggtagcactttctcatggtgccctcacatggcagaaaaggcagaaggaggaaggacaaaaagtgatgaaggtggtatcctcacttggaggaaggcagaagggcagaaagggcctagctagttccctccagcccatttataagggcactaatctattcatgagagcagaatcttcctgatttcatcatttccgcagagaccccacctcaaaataccatcaccttggaggttaagttccaacatttaaattttggagggacacatacattcaaatcatcgcagctagcttgtgacaaaaagtctggagtagcatatagcgcatactttttcattacaccacactaagctgacattttcttttggatttcctgctttccctccttattaatagtaaaataaataccagcctgtaggtagacatttggttatgattccacacagtggctgaacttctcaaaagttcttgtaaggcaaaacccttactaaatatgtcattgacaaaaacagtggttcccagatctgactgcatcaaaatatcccaaaagatgtttggaaaatatgtttttataagacctatagattgtgattgagtaggtttgaggtggggcctgtgtatttgtatttttcaacaagcttttcaggtgattatgataagcaaccagatttagaaaccagtgaataagttcaacgagatgatttgcacagtggcctcttttattcatcacttaggttctgttatttttagagccaaattaatcaatcagtgcattgttttaacatccttgccttacatatcttttccaaaaatttttaattttaaagggaagaagggaaagggaaagataatttcctatgtttgtgtgaacacatccttggctcttctaataatatgaaatacagtaaataatgacttgtaactattataattgtttttaacattcatgaatgaaaactaactacaatgtgggttgattggatttcaggtttcactctgctttaataaaaattttattacacatccagaaagtaagttaagcaggcctggcgcattggctcacacctgtaatcccaacactttgggaggctgaggcaggcagactgcttgagtgcagaggttgaagaccagcttgggcaacatagagaaaccgtctccacaaaaaaataaaaaaattagccaggcctggtgacatgtatctgtagtcccagcaacttgggaggctgaggcgagaggatcacctgagtccagggaggttaaggctgcagtgagccataatcgtgccactgcattccagcttgggtgacagagtgagaccctatctcagaaataataataacagtaataagttaagtactgttgagcttttttagaataatcattgccgatactttcattttctaattaacttgaaatgtctgaattattgcttgtaacacccttgtgaagtaggtgttagaatcagtcatctcttcatagactaggcaaagagtaggctgaggatgggttttgactgaacaaatatttattgagtacctactatgggcagattactcagaagggtaatagccttaccctgctattaattagctgagcaaaatcaaacagatctctgcagctccctgagcctcggtttcctcatctctgaaatgaggggcttgaatcaggctgagagagacagacagacagacagtagtcttgagacttcttcccattcttcttttcctttatgactttttatgtataatgtgagcagctctttgaaggaagccaaacttcctctgactatcctgaaatttaactatccacctaaatatccatctaatgttgcatgacatcatctcaggagtggcatttgtctctcccttaaaccttccatggaaaatggtaacaataagcaaagtttataatctgcctcctcctcctgattttatacatatgaggtgaatgttctggaagttataaaaatggtttaagtgtgaggatttagataaatttataaggttacactttgtcccatgttattcagagaaattgggggcatgtctttaaaatattttctaatgtaattggcaacataaaattgtatatttctaaatctctatttctttattaccagtaagcttgagctccccccgccctgcataattttgtctcttcagcttttaatacttgtcttacagatttgactcaaaccttttgccacatttttaagcaaatatttttccagttgcttgttatcccttaacaaatattttagagcattttcaaatgtttaaactatattaaaactataaaaggtaaataggaaaagtatataactggatcagtgtgaacctatgcaaacaaatccagaaataaaaccattaatttctaaaacaggtgattttagtaaattagacttttaaaaaaattcaccatgagtagttgtgagtttaaaatgtatttcgtttcaaaaagagtttatataagtacaaccactaactttttcagacatgaaaataccatgttctgggctagtcatttagataatgaattatgagaataaccaaaggctgtgtttgaggtaacattagcatattttgcccatccctcagatacactttgaaatactgtggtccacagaccattctatcaagtgacaaattcctagactgaaatgactgtagatactttctgtatagcatatcttatgttatgcttaaaagatgaaatgagctttatatgtttgtaggtaattaaaacacaagtataggatagttaaaagacaccatcacttatactatagacttataaaagggatcattttagaactctacgtattccagaaaagttatatagaatcagttcctaagactggctaaacttaattgaattcatttttcccatttttatctcgagaagatatcatattaggtagtgaaagaggcaaaaatgtaaaaaaagaaaagaataattccattgaatcctcaaattaaatgactactgaggcattgaaagttaatttgagtgcggggattcatggaaatgttcatttgtgcagttacagaaggccatggattttaatttatctgtaataaatctggttgataccaagagctctagaactcactgtatttattctatacccatcagttactccttccctaactttatttttttttttttttggctctgttttataggaagaagaaaatctgtgagctctatgccaaagtgctgggatcccaagaagctttacatgtaagaaactcccagctttaatccctagcaggttcttctctgttcactataagtagtaaagcaaagcatattctgattttttgacagtcttatgaagagagtataaagcgatatgcttaacttggaggataaacttcagcagtcacaaaaggtcattaaaagctggtattaggcgcatggaatttctgacacagcaacttctttgggctgtttaaatgttcactagataactggcagccaattgtaatgagagcctagagctgcagggattatgtcaagaatgggtgagttgggttcctagaacagaagtcctgcccccagtcagtgtcacttacctgctgcacaattaaattccagatatgttatcatttgttggtgaaggcaaagtagtatgtacttgacaagatagactgaatctagagtctcttcccaggtcaaagtcatactaatttgtttttccatgtgtgaactcaattcacaactcatttaggaatatcagtgctttcaatccaccactgaaagcaattaggagaatgaaattacgtctttttgaaaaaaaaaatagaatggctgagcgctctttcaggggcttgtctctaaactgttcaaataataaactttctgaatgtgccagggaaattagagaaggttctctcatgtcccctaggaaatagttttcatcttaattgccgctttttcgtggaattcccatcatacatgtttccagcttagaaaagtggctgggaaaaaagcctttcttagacatttgtttgtcttctgcctcctccctcccaccctttccttagcaataatgcctgatagatggggaagtaaagtctgttattagggactccagagatttgagcagacctttccacaagctgaattgttgatggggtttcctatagacttagctctaaagacttcagaatctgcatggatggatggatacccctctctcccagatactggaatacttcatgtcttccctaatcaagaaaatgggaagagcaaagtatacatgttttgccacatggtacttcacaaaaggccattgcttggtactatcatgtttccccttaagtgagttagaaaaacaggattttctttattttcttaatgtaaactttttgttaaagcaacgatattattgactcgcagcatttcagctttgttttctcttttgtattttcttccccactgaactgcagccagtgcattatgaagagaagaactggtgtgaggagcagtactctgggggctgctacacggcctacttccctcctgggatcatgactcaatatggaaggtattacgcaagcactacgccaattaatccaagacctgtgccaaatttaaaaggaaaagcagagttcaatgcaaattctagaaatagttgtcaaaatccccatttcttatgtcctagataatacttgtatatttctggatgtccatagaaaaataaggatgtcattacatagaacaatagctgtcagcatacagaacaatagcagaacagtggggaggatttcagatgtgaacagtgcttgtgagaatgaagcaagctacagtgtcctccaaggggacttcgtgagctcaacttgacatttagtctcacatgactgccttaggctccttggcaccagtcaacacagaaggacattggatgtgtttatccaacacttctgtcttgccaacagagcagcatcagcagacagtcctcttcaggggaagagtcctcactgtatacagttgagatgtgaggaaatgacatccacgtggggtgggtccaccttgacctagaagccccttgctccatgggagccattatctctatgcttcataggcatagtgtccggtaccttgctcagttataagacttgctcagttacaagagacaccacactcagggaagcccaaagtgatagcctcctaccaggtatttacaattcatttagagtcctcccagcctggatgcagttcactaatgtggggatgggaggggaggcacttttagcataaatggtgttgcctccatagatggcattacaccttcatctggtttccagagaaacagagctagaaagttaatacaaggtcacatttgtccactgaaaaggaggaagtatttattaaccttttcgttacaggagtttttagtctgtttttttttcttcttaattgagtcagatcgcctttgttaacaatagcaggattgatgaactggattagttctggtatcaaagtagaagtctagaagacaagactaagatgaggaatagatgaaacccagggttctggaattggaaaaaggagtgccaacgggttgagatgaaggccatcagggtggggggcaggacatgcagcttgggagagttcatgaaactagctgtggacatggcaggagtcaaagccaaaaagttggaggggacagctgtccattcagtccagcccttctttgtaagaggagacccatttccttgctctcagccagtccccagagaagttcagagaagctaactgtacagaggttgttttcttaaagagacacacccatataatgtctcaggtctctcctttgccagaaatgatagttgacgtccctgtcttcccacctgccactgcagttcctcctgacacactgggagtgcctgcaaagctggatctgtggctgttttcaagaagagtgcaccttcccccgagaaagacaggacagggagaagaatggactgccaacaggaaacagcaaagaaatctgatttggggattgaatacatgttcttatattccagctctggctggcttggaaaagatcaacatcccctttaatgattgatgatctgatggcctgattctccctgacttgaaagttcagatcctctatgcagatccagaaagcaaaaagtggcctttcaccttgggctaagtcatacgggtgttttttaaacagtctgaatttctgtgccttctgcagactaaatgagggcagtgattggctcatttaccctgcccaccttcccaagtaactctgtgtaacctcttggttcccttgaagggtgattcgtcaacccgtgggcaggattttctttgcgggcacagagactgccacaaagtggagcggctacatggaaggggcagttgaggctggagaacgagcagctagggaggtaagcaggaaagcccaggctctctccctcccgagtcacggcaacgtttttggcatctggtcttgctagttcttgacactgatagaatctgtatgtccatttctctgcccctcactcatggggctcatctgtggctagcagggccttgaatctgtagaaactatacagcctcttttcataataccatggtgactttctttcaggtcttaaatggtctcgggaaggtgaccgagaaagatatctgggtacaagaacctgaatcaaaggtaagtttggtgactctgggcactatctctccttagaccaatcatggaacataaaactcacatctcccttcttctagcctccgatttaattatagatgcaactatcccaggggtctccatgcatggatcttgcagtgttttgttcctccttgtcagcatgagttttttgctcatgatctgtgttccttcatctaggacgttccagcggtagaaatcacccacaccttctgggaaaggaacctgccctctgtttctggcctgctgaagatcattggattttccacatcagtaactgccctggggtttgtgctgtacaaatacaagctcctgccacggtcttgaagttctgttcttatgctctctgctcactggttttcaataccaccaagaggaaaatattgacaagtttaaaggctgtgtcattgggccatgtttaagtgtactggatttaactacctttggcttaattccaatcattgttaaagtaaaaacaattcaaagaatcacctaattaatttcagtaagatcaagctccatcttatttgtcagtgtagatcaactcatgttaattgatagaataaagccttgtgatcactttctgaaattcacaaagttaaacgtgatgtgctcatcagaaacaatttctgtgtcctgtttttattcccttcaatgcaaaatacatgatgatttcagaaacaaagcatttgactttctgtctgtggaggtggagtaggtgaaggcccagcctgtaactgtcctttttcttcccttaggcaatggtgaactgtcattacagagcctagaggctcacagcctcctggaggaagcagcctccactttggatcaggaaatagtaaaggaaagcagtgttgggggtagcggcatgcagaccctcagaccagaatggggacatcttgtggtctgctgcctcaggaatctcctgaccacttgtagtccctccgacttctctagacatctagtctcagtgctagcttatttgtatttttcctctttcacttcttatggaggagagtgtttaactgagttagaatgttgaaactgacttgctgtgacttatgtgcagctttccagttgagcagaggaaaatagtggcaggactgtcccccaggaggactccctgcttagctctgtgggagaccaactacgactggcatcttctcttccccctggaaggcagctagacaccaatggatccttgtcagttgtaacattctatttcaacttcaggaaagcagcagttttcttttaatttttcctatgaccataaaattagacatacctctcaacttacatatgtcttcaacatggttacctctgcataaatattagcaaagcatgccaatttctcttaagtactgaaatacatatgataaatttgactgttatttgttgagactatcaaacagaaaagaaattagggctctaatttccttaaagcaagctcacttgctttagttgttaagttttataaaagacatgaaattgagtcattttatatatgaaaactaagttctctatcttaggagtaatgtcggcccacaagggtgcccacctcttgttttccccttttaaaaactcagatttttaaaagccctttccaaaggtttcaactgtaaaatacttctttttacaatgtatcaacatatttttatttaaggggaattaacaattgccagggaaaccagccaacccaagtttattatatcattaaccttatcataaattcaaacctaagttgctggaccctggtgtgaggacataaatcttccaaagttttgcctatcctaagagctgcatttttctactgctctttaccttgcattttagctaatttaggagttttgagaatgtattggatacgctccagtacataaggagttgccgcatattatatcagactgctttgagaaatctcatccctagtctattgcagttgtttctattagcttactgattaactcagtcctgacacaccttttgggaaatgctgatttaaacttcttaactggcaacagttggaacagtaatcagtttgctaacatatttaaagtcttgaatgttgaagaactcatgtgatttacccttttcaactttttggaaaacgatttaatttattctaattagattaaccctattaatctatggattgggtatcaaaatgaatgccagtccagatgtgcctagacacgaaattggagctgaggactctcacgatatgcaagttcatccaacgtgaagataccataagctttttctctgaaccagagaaatgaaagtcagtttaagaggctgatagatcttggccctgttaaggcatccacttcacagttctgaaggctgagtcagccccactccacagttaggccaagaattagattttaaaacttcatctgtctgtcccagttaactgttaaataaggcctcatcctccactgaagagtatggattgaaggattgtgaactatgtttagtgtgattgtgaacttggtgcctaatgttccatgtctgaagtttgccccagtgctacacgttggagtatacctatgtgtgtgctttgccactgaagtaagattttgcctgtatggtactgttttgtttgttaataaagtgcactgccacccccaatgca

SEQ ID NO: 700 - DNA, 2748 bp, Homo sapiens
aaaccataccatatcccaccagagaggtaagtgggagctgagagaagatgagacccagggaggagctactgcacatgacacaggagaatacatgggagggtcccttcctcagggagcacaggaactctgagactcagcaagggtgtcctgggagggctcggggatgggagagtacacagattcacaactcattcagaactgtagaagatgatggatgtgaccaagatcactttagtcctaggggactagagaaggaaaatgacatgaggcagtggggtatctgtgtgttctcccactgaccacgctttctttagtgactcctgattgcctcctcaagtcgcagacactatgctgcctcccatggccctgcccagtgtatcttggatgctgctttcctgcctcatgctgctgtctcaggttcaaggtgagattgctttgcctctagcactgggttccctatgaatcctcagagctaacaagaggaggaaggctcctgtgtgtcatgtgaggtaatgacgtggtgtctaatgaacctgcctgcagttcttgcatcatctctccttccttcaggttaacttgcagtgggaggctccatggtggtccactaacagtggaatgagatggcttccatttagtcagtggactctaatatacactggtgggaaagtggactctaatatacactggagggtcagtaatgagatgtggggagggacaatgattggaggacccaatgtagagacagcccagagtgaggagagtattgaatggttgaataaggggaaagggtaataagagactggatggtgctccatttactacggctattttgagataaagaatttctgaaaacataagggaagatgaaggggtgtcaggaatgtggtcttcctccccaaggacattcctaggtattccccaaggtcatctcccaccccaagccccactcttcattttaccctcccccctcttcttccacctcaggtgaagaaccccagagggaactgccctctgcacggatccgctgtcccaaaggctccaaggcctatggctcccactgctatgccttgtttttgtcaccaaaatcctggacagatgcagatgtgagtggttagatgtggtgttggaggtgaccggtctcagggggaggagggtctccattcaggagagttccttgggaatgaggatgaacacgtttatctttcacacagtcctcctcccacctacctttgccctgccctccctcagcaggtctcaggctccctctcattctctttgttgccctcaaagctggcctgccagaagcggccctctggaaacctggtgtctgtgctcagtggggctgagggatccttcgtgtcctccctggtgaagagcattggtaacagctactcatacgtctggattgggctccatgaccccacacaggtgccagtatatcctcccctctctgttacctctcaaggtgctattgttgcccaggcccactccctgtcccctgtgcctgcccaggaagtacttcagggagcactggagctcagattctggggaatatttggggggaaagggaaggccatgaagcatctgaagatctgagttctgtggaggtctctatctttcagataaaatcaatctgccttcctcaggcgtattacataattctcatatgaggctgggttaacaattctctgagcttcatggagtctttgcctactattctgaaggaactcttaatgaagataggatcaatttttgtccccatacagaactgacattacttttgaggttcacaagctaatcacaaatgctacatcaattattgttctgcaaataatatattaccttgagttgttccaaaggtcttatgtttattggctggaattttccaatagcaatgaggagtcaaggaagagtttcctactcaccggcagcatctggaatagcagaccaactttcctcatgctggggagcaaatcaggtgttgcagctaaggggccatgcaagaagagctgcaatggccattcccttcacctggctacctcctctactctacagggcaccgagcccaatggagaaggttgggagtggagtagcagtgatgtgatgaattactttgcatgggagagaaatccctccaccatctcaagccccggccactgtgcgagcctgtcgagaagcacaggtaagaaacagaggagctgcctcttcccagtgttttccatctcatcccccattcctgggtctgaccttcaggaaatcttcctgagctagaaaatacaatgttagtgtgtcttctcttatctcctctcttctccactttctttgaatctctctcctggattgggacactggtgaaggtgagggagaggctttaacttctaggctaaaacctgggatgccccttcattggattcacaagcttcctcagccccattccatttatgtcttctgtctctccagcatttctgaggtggaaagattataactgtaatgtgaggttaccctatgtctgcaagttcactgactagtgcaggagggaagtcagcagcctgtgtttggtgtgcaactcatcatgggcatgagaccagtgtgaggactcaccctggaagagaatattcgcttaattcccccaacctgaccacctcattcttatctttcttctgtttcttcctccccgctgtcatttcagtctcttcattttgtcatacggcctaaggctttaaagagcaataaaatttttagtctgca

SEQ ID NO: 701 - DNA, 16536 bp, Homo sapiens
gtgggtttgagagaagagaagcaggaacttgagagaggaggaagagagaaagtaattaaaatgtatcgttttaacttaatatttaaccgaatgatagcaaaatcttatctgaaattggaaaagtcaaggttttgagtgctggttcggtgcccatttctttatgatttgatagtctgagaagaatacgacgggtgtggcttaaaaacctagatcacgtgtgtagttggaattgggtgttatatgagcaaacaaaataaatacctgtgcaacatacctgctttatgcactcaagcagagaagaaatccacaagtactcaccagcctcctggtctgcagagaagacagaatcaatatgagcacagcaggaaaagtaagcaaaaaatatattactgttgataatatattctcttcaatataacaaataaaggaatacagtattaataatgaataatttaaaatttaaaattcatatctaaattagatgatgaataatttaaaattcatatctaaattagaaatgatacactggaatatgatatgcaatatatgctataatatgtaatgtatactgaactacagtggaaataagctattcctaaataccttcaaaaagaatatatagaatctgtatctattgtctttatttcctacattaaataaatttgccgtaaagtgatagtttattccaagctaatcatgactgatttgtaaacctaaagttagaaaagtctttaatcagaagctatctttatattaagaaagcataatttaaatgtgttattatttgtattcatattttttgtgaacacaagaagtctgacaaaacttttatgagagggatttgagaagattttgaaatatacttttaatcttactataaaatatcttacaaaatactcattgatctcacagcattagaatcatcaaggttaagcaagacatcacattcaaattccgtttaaagggggcccattatgacacaattcaggcaatttccacagaaatcttatggaacagtatctcccctatataaaagtcaatatgatcttacagaaaaataataatgcaatttgaatcacttattagcactcagaacacaaatatttgttttttcttctataaatttatacttatttttcaatgtgtttacaggtgcacagaaatgcatgtggtcattcaatataatcaattgatattattaattgcctaatttaaaaaaatctgtgcaactatttccagccatttgttgtgctaggagtgtatcacacaataaaacacctcactatgataattcagtttaaaggttctgaggcttacctttatgctgtgcgacaaaacaggctcatgtcaataagactggttggaaatcacatgagtggcccattggtactgttcttacaccacttcactttactttactttcattcattattgattaatatttacattcctcatagaaaataattagaaaaaagaaaatttaaatttaccatttactaaactcgacttaaaagaaataatgagttcatagagcaaaagtataaaccaatcattaatgaaaataataactgatgaaatagataatcctcccctcttgagtgcaacatcaataacttagctttttgacagcatttcatttatgtttacccgtcctgcattttattttcctcaatcctaaattgtgacaatactaatgtctatttcataaggtagttgtgagaattcagtaaattaatagtgaaaagcacttagaatagtacctggtaaataaaaataagtcaataaatattagccactgttattattgttgctttataactttttgatatttactaccacggagtacagaaaacgtgaggctacattaattttttcattcgtttttttgtttggagatggagtatctttctattgcccaggttggagtgcaatggtgatctcggctcactgcaacctctgcctcccgggttcaagtgattctcctgcctcagcctcacaagtagctgagtttacaggtacacgccaccatgcttggctaattttagcatttttagtagagacagggtttcaccatgttggtcaggctggtctccaactcttgacttcaggtgatccgcccacctcggcctcccaaagtgctgggattaaagggatgggcaactgcacccggcctgatctttattctctggacagccagctttgagacttcaggaaaattattcaatcactgagtcagttgatcctcaattatttcagatgtagtaagaccaataattcaatagtactgtcctggtagcatccgttttaggtttaaaagtaattcatattgtttacagcagcacaatttgcaattgcaaaaatatggaaacttcctaaatgcccatcaaccaacgagtggataaagagaatgtggtatatgtacaccatgagatactactcagccataaaatggaacaaaataatggcctttgcagccacttggatgaagctgaaggccattattttaagtgaagtaactcaggaatggaaaaccaaataccatatggtctcacttataagtgggagctaagctatgaggatacaaaggcataagaatgatatagaggactttggttagggataaaagactacacgttggatacagtgtacactgctcgggtgacacatgcagcaaatctcaaaaaccaccactaaagaacttatccatgtaatcaaaaacaacctgcaccccaaaaactattgaaattaaaaataaataaattttaaaaataaaaataatgcatgtaactcactcagcacaagccacagtgcacctgtcacatcataggcacctgacaatcagaaactcctactattagaactttatttccaagtattctgatatttattttggcatggaccacattgaaaatcctgcaaagttgaaggatttgacaaatgaataatgaaaattaattggcagaagatgaaatttcaattgaatttttattatatttgcaattatgttgattctgtaaagaaagagctcagtgaattgtacatgctttaccacaataaagatgggttttacagtacactgccaagcactggaaatatgtgatcagcttttatttttaaggacatctgtggataagcttgctagctagaaactcaaatacacagtttctccagtttttaaatacatgtgtgtggtctgaatgcacacacacacacacacacacagaaacacacatacacaacaccaactctaacctctgtaattttgggctcaaatctaagctggaaggagtctctgcacataaattagatgaacaaaacaggctgccaaagctaagtttcaaatgggtgtttgagacaagtaacacagaagtggagagagaaaattaaaagaggacaataggcaaatagagaaagagacatcatcctaagcaggaaggtaaatgtataactgtttttatggagtcagatccttttggcctaagcagaaaattgagcaagaaagcagtgtattttggacagacactgactctgtcagcaaagtaaaggtgacttagaacatgtaccagccaatagttgtgggtaaacagttgtcttcaggacagtgttagaaaatatcaggattaaacatctttggagaaaaaaaaatcaaaagaataaatggtgctgggaaaactggctagccatatgtagaaagctgaaactggatcccttccttacaccttatacaaaaattaattcaagatggattaaagacttaaacgttagacctaaaaccataaaaaccctagaagaaaacctaggcattaccattcaggacataggcatgggcaaggacttcatgtctaaaacaccaaaagcaatggcaacaaaagccaaaattgacaaatgggatctaattaaactcaagagcttctgcacagcaaaagaaactaccatcagagtgaaaaggcaacctacaaaatgggagaaaattttcgcaacctactcatctgacaaagggctaatatccagaatctacaatgaactcaaacaaatttacaagaaaaaaacaaacaaccccatcaaaaagtgggcgaaggacatgaacagacacttctcaaaagaagacatttatgcagccaaaaaacacatgaaaaaatgttcatcatcactggccatcagagaaatgcaaatcaaaatcacaatgagataccatctcacaccagttagaatggcagtcattaaaaagtcaggaaacaacaggtgctggagaggatgtggagaaataggaacgcttttacactgttggtgggactgtaaactagttcaaccattgtggaagtcagtgtggcgattcctcagggatctagaactggaaataccatttgacccagccatcccattactgggtatatacccaaaggactataaatcatgctgctataaagacacatgcacacgtatgtttattgccgcattattcacaatagcaaagacttggaaccaacccaaatgtccaacaatgatagactggattaagaaaatgtggcacatatacaccatggaatactatgcagccataaaaaatgatgagttcatgtcctttgtagggacatggatgaagctggaaatcatcattctcagtaaactatcgcaagaacaaaaaaccaaacaccgcatattctcactcataggtggaaattgaacaatgagatcacatggacacaggaaggggaatatcacactctggggactattgtggggtggggggaggggggagggatagcattgggagatatacctaatgctagatgacgagttagtgggtgcagcgcaccagcatggcacatatatacatatgtaactaacctgcacaatgtgcacatgtaccctaaaacttaaagtataattaaaaaaacattcaaaaaaaataaaataaaataaaaaagaataacctaaatgaatatattccattttatctaagtgccttattgtacttaactctgtttatctttccttatgttattgcttttttaaaagatactcttattctctttataaaccagaggacttcatttctatgcaacacttgttaggtgccagacatgggactcaatgttgcatgtacaaagatgaaaagacacaatttctgactgcaagcgtgggaaaacactggtaccatctctctgtctgatgttctaggtaatcaaatgcaaagcagctgtgctatgggagttaaagaaacccttttccattgaggaggtagaggttgcacctcctaaggctcatgaagttcgcattaaggtgaaatactttttccatttgtatttaattttaagtttaaagaattcagaaaatattaaaaatagaaacatccaaaatccactagaggtattttttatataattatccagaaaataaaattacatttgttgtcaaggaaagtataaattgttaaatttttttaaagtgggcaaacagtatatgaaggataactccagtgaaatacaaaagaatttataggtttgtacagaaaaaaatgcaaagggatatatatcaagagttcacaatcaatttgcattagatattttcttggtgttaatttgcaatttctacttctttttcttttaactatgcattcttctatattatacaagacaaaaattttaggatcaattatctcacagattattctaaattgttaaattcaagggaaaaagaggaaggttttagactggataaccttggagataaactgaatctttcatatttgggaatagtagggattatcagcaaaacccttgagaatatttttgaataacaattttagaaaattgggtttgttaagtccatctgacagtcataatcttttctgaatctaaacatcttctctttattctgtagatggtggctgcaggaatctgtcgttcagatgagcatgtggttagtggcaacctggtgaccccccttcctgtgattttaggccatgaggcagccggcatcgtggaaagtgtttgagaaggggtgactacagtcaaaccaggtacaggattcacactcagggaacatgccttggttcaccatcacaagattagtcagcctggatgaggaaaccgaggcaatgaaagacgaaaggacttgcacaaggtcacagggaagctgggacttcaggggtttcctccttccctctctgcttgcctgactcaagcatgtatgacttcaggcaggcatgcgtgtattctacccttcaaccattatgtactactagatgccaggcactaggttagagcctggagatatatgaggatcaaaagagacacagtgcctaccagtgtggaattcataatctagtaacttccacgttagtgttagctgaacactgtcttctgtaagtgcccaaaaaactataaatgggaggggagaaaaaaaaacataagtatggacactgttctgtgctgagttcacaaaatggaggctgcatggttatggctgaagaaacatgacctttccttaggtgacctatgcagctcctttaccgatttcctcttccaacatggtctctcttcctgagcatggaatcaatgaaactgactaggtgaaagaaaatgaaagaaacatagcaggagccatccaccatcaacaatgtctgccttattacctttggccatgcttaaatgtgactgattatggattactaattattttatcttcaatatttattttacctaatcttattatgtattaatataaatattactatattaattaaggatgaataactaggacatttccataccatcgttttcatatgaactttacccataaaatgttatgcaccaatcatttttcttggtcttgtgaaatagatagcataggtgattaaaaataaaatttgtctttaaagaatcactttagccaatggattcgacctgtccacttaccaagtactaatttagactgtgaaaagaaaataataaaataaactgtccaatttgagttttagctctatttcctttactcagaaaaaaattaatatcaaaacgactgccttatttctcacccctcctccttccaccataacagtaaaaatagataattcacaaattaccagctaaaaacacttgaaagtcaattcttatcctaaaagaaagtgtctaacttgttgtggaaggtagaaattttcagacgaatttctgtaattcttctttgtcctatttttgttagttttcctcaaaaaagaactaagatctttttgaaaacattcattttataattaagataaacctagtctctttgaaaagccaagacctatgttaaaaatctcatttttgttgtaaatcaaattcttacaaaataccagatcttcccaacatctactaggactaaaataggctactttcaactaaaatttatatgtatacttacagcaaaaatatttagttaagatttaattagacaaggattacataaattatatctgcaaagcctccaggataaattagtgcactgcgtaaaattttattaacacagttgatggaatttttttaatccatcttgtttcccacacttgtattttctctttaggattcttcaggcacttataaacccaaactaaaaaacaatgccttggcaggcaatgacaaatgacatagttgtgactagaccctatttcttagaaacttttcagacacataattctaatctatacatgtgagcgttaagtttttgctctattaattcctgcatagaaatttaagaagaatttgttttattcctctgcaggtgataaagtcatcccgctctttactcctcagtgtggaaaatgcagaatttgtaaaaacccagaaagcaactactgcttgaaaaatgagtaagtttctgatgctttctttgcacagactttgagtttgcacattagttatggtcctgtctcatgcctttgtgtgtctttgtattgcactgcccagtctaggcaatcctcgggggaccctgcaggatggcaccaggaggttcacctgcagcgggaagcccatccaccacttcgtcggcgtcagcaccttctcccagtacacagtggtggatgagaatgcagtggccaaaattgatgcagcctcgcccctggagaaagtctgcctcattggctgtggattttcgactggttatgggtctgcagtcaaagttgccaaggtagaaatgacaatggatgataaaaccggttacacgcagactgtcaggaaccaaaagggaagcaatttcttgcaagaatcagaaattatttttgtagatttgaagtgtcgattaagagtagaaaaatgacccagaaagaactgagagcacaggctagaaatttcaccaatttattgcagataaaaacttgttaagaaaatgtaaagatgtcattttcaataatttttcttctgaatttgctgtttatgggatcatgaaattttagatctgtgaactaattcatgttgtaattcaatcaacaattagagagcacctatacatacctcaggcaccataggttctgctaggctctgacagcaaaagtaaatgaaatgaagcgtttgcccttgaggaccatctagtctgtggatcctctcctcccagaattaggatcaacagtagagtccaaaaccttacctgatgcacctcgaaaccaaggctcacccactctgtggattcttagacggaaagtaataaagactcagtgatgcataattcactcattatgacatttcactgctaaaactaactcccctggcatgaacacacatatgtattcagaagtggtaaatttcaagcagaaattctttaaaggctcctcatctgagtagactgaaaatctagtagtatgttttattttatgaaacctagatcgagagatataaagatatttgcccaaaatctgacttctgcttaatatgagcactaagactaaaatatcttttacaaatctcctgctgaatgtcaaatcacaatccataattattagcacttttaaaccacagtcacaaacaagccttgtatttttctaagtaaggtagaaagtggtgttgtcccccatagtattgaataacacttggtgaatgaatgagtgaaatagacacccttaagggaatataagaatgagattatttggaacaggaacagcatgttacccaaaacgaaggctgactatgggagactaggtttagtaaataaccgctagccaatttacacaatttagaggacatcttttccaaatttcggtgactttagcacttactcccttgttcaattgcctcatctattttaatgggtagtctaagtgagcctacccaagaacagaagctgaggatactcataacaacagattttatttattattaaaatatagactaatgtttcattgctgtgttgttcacaagtgtattttttaaaggagggatatactggtcacgactactgaacaaaaatgaagaaaggagttaattattgagagttaaagtggaatatttttcagtctcctggagtagccttttccacttattttattttccgaatattgccttggtgtatgtatgagatactgaagctggctatcaagggatttcagcaattgagagtccctacaagattgtaatcactgtcatctggatctcaaagatcatccagtcccctggttcccagcctgacccattggagtcccttgaggacttagttccacctgcagagattctcatttaattggcatgggctatgacctggactgtgggatgtttttaaagctccccagatgaatctaatatgcagcagtttcagaactactcaactaattcaaccccttgaatttaaacatgaagcatttcaagccaaaacaggtttcgataacagattggacagaagagtctgagtagttcttgataacacacaagacatggcactttataaagcttaagcaatttctaacaaacattatttaattcatttttgcattttctgaaaacataggtcaccccagggtctacctgtgctgtgtttggcctgggaggggtcggcctatctgttgttatgggctgtaaagcagctggagcagccagaatcattgctgtggacatcaacaaggacaaatttgcaaaggctaaagagttgggtgccactgaatgcatcaaccctcaagactacaagaaacccattcaggaagtgctaaaggaaatgactgatggaggtgtggatttttcgtttgaagtcatcggtcggcttgacaccatggtatgatccgtgacatgccctgaaatttctgcctctgcaacctggaggatgcatttaggcagtagaatatacgtattatgtataaaggatatttttaatgatgaatggaaatttcccgtcatctttttgttacctggcttgtttaatttattgttatgagaagtcttccattcaatcagctaagcaaacctgtctcaagtcatatttcctcgagaaaagaaaaagggcttgttttttttaacacagccactacaaatatgctttattaatttttagtttaaaatgcaaacttaaatatatataaataatacaaatcattttctcaaattaaaaagttttatttttcttttacattcttaacaaaaatattttaacaattttatgtatgctcttaacgaattccaaactttttgacatagtattcttcggtcaaaagaaatgagcaattttagaccaactattattttattaacagaaaatatgccctaaggaaagtgactgctttaatacattgctatattttatcacagcaactggacagtgcctgacacaaaactagtacccagtattacttggactgaatgctttaaataaagtcaacagattttaccacccgcaaaagttaagagctacatatctcatggcattgtttatgaaacgcatgagacaatgcatgtaaaatactttgtgcaacacaactcatcatgtggttagcttccaataaatgtcagcagcccccttttttattttattttatttatttatttattttttttttttttttgagacagggtctcactctgtcaccaggctggagtgcagtgatatgattatggctcactgcagccttaacctcctgggcttaagtgagtttcctacctcagcctccgaaagtgctgagtacagacatgagcaaccatgctgagcctcagttggcattattgatatgaaatactatttccaatcttgcagtgcttatgtcatctttgaattattacatgatattactttcaaacagttacaaatatcaaaggcaacggaaacatatctctagctatattttacctatccagaattatctagactcctactgaaaaagtctccagaaacaaaaaagtttccattgctgaggttttctagaaggtccagcagtgtgggtaacagggagcagcaccctgagatcaaagttcccagcagccttgacctgggacaaatgccacagaggaataaagtatcaagagaatccaattttttccagggctatagcttttctccttatgctctttttctatatcttcctccattttctcatgtggaactggagtgtacattatctcaagacaccaaatgtctgacagccacatgttctgaggatgtcagtctcccaaagatcagaatccaaaatcaaagaactaatcattatatacctagagggatcctaaaccattttctaactacagaacatgttccaaaagctgactggaaaagattttctgaactgtcttttgaggttcccaaataatcagtgtaatttaatgtaaaaccaatatacatttggggaggtaaaaacaatgtttaaaacatgtccacttgagaaatggacataggaatctgttaaaaagggaggctatcaagtggacaagagactaattttggtgatatactcatttatcttgttcatcatcaaaatatctgattcaaagtattgggttcaaaatacctatgtaataaatcaatgaaaaaggaaccaactcacacattgcctaagaatgatgtacacttgtacaaggaacaggactttatatatgtttgtaatgatgtttgcctctttattcctttattaggaagaactaagggcacacaaatttattcgtccatgctttcattcaaaaaccattttctgggcatttgctacatccacagcattatcctatgcaaagaaagggggaatgaaggagcaaaagacatgatctcttccctctacacactcacaatccagctaagcctattacatgatattgtgcattatgagtatgaactatgccactccacgttaaggatactaaatgttcactttattccagatggcttccctgttatgttgtcatgaggcatgtggcacaagtgtcattgtaggggtacctcctgattcccagaacctctcaataaaccctatgctgctactgactggacgcacgtggaaaggagctatttttggaggtatgtagttaggcttcagagccaaattctcattaacctaagaatttctctccttttatgagtgacaaggcaagtttttgaaaagcaatgaaattaaaaataaattaaaatttcttttctatagtctccaataatgcagaacttttcttttttattttttggagatgaagtcttgctctgtcacacaaggtagagtgcagtggcgcaatcttgactcactgcaacctccacctcacaggttcaagtgattctcctatctcaacctccagagtagctgggattacaggcatgcaccactgtgcccagctaatttttttgggtagagatgagggttcactatgttggccaaggtggtctcgaactcctgacctcaaatgatctgcctgcctcggcctcccaacgtgctcgtgctgggattacaggcatgagccatcatgcccagccccaagatagacttttctgatgtcactattaaccaggactttcatctccacctctttttgtacttgtgactgcgtaaggcaaggaaatttctagtaggccatggaaatatataacaataaatcatatctacacaaaaatctagacaactaataaatttgctccttaactttgggcataacatctgtactataatttctctgtgagagagagaataactaaggacccttgtttatctgtgattttttttgtgaaagcactgtaaaagcatattgaagtactctatctcttattatcctcagttatagcagtctggaatgcagcactttttctaaactttcatttatttggaaaatcttctcttcaattctcctacttaccctggttgaatctatcaatgatattttcttcttttcaggctttaagagtaaagaatctgtccccaaacttgtggctgactttatggctaagaagttttcactggatgcattaataacaaatattttaccttttgaaaaaataaatgaaggatttgacctgcttcgctctggaaagaggtagattttaagttgtttttttgttttgctttgtattctacagtagcggcggggggggggggggcgttgtctagcagagaatgaaaaggtggaaggatgagaaaaaattacagtgccttggttttccattgccagttcaatctttgcatggagcacatgtaaggtaatactgtgagaagctaaaaacagttgctttgcatttcctattctgctgaaggcaaattatgttgattatagcataactgaatgatcagagtcattcagccttctttaaaagagaacactcactttggcccccatccccctccaaaaaaagtttaagcaaccagaattataacatggaatcactgacacctctgcctgtcatataagtaagtgtgacatctaatgattgtatattaaaattattttcaggacatcctcagcatattcattatgggagtaggtggaactacattgagattgatttctaagtagatattactagattttcctttttcttttcttttctttgcagtttagaaaaaaaaatttactaagaaaagttgttgtaaaagagaagggtactaaaccctattttaaatatttgtcttacattttctccaagtcttagaaaaataagccaattctatttcctacctctaacacttacacttacaatcacctaatataatgaactttgtcacttgcatttatatgagacataactggaaataggcagttatatctaatctctgccttctagctccagagtctgagatttttctgctatcccacacttattttcatgaggttttcaacttcaaatagtgtttctttgaaactcacaaaactatcatactagatactttatccgacaaatattcttgaggaaggaaagacactagcacccacagagcaccagctgttctactaagtgtcttacatgcattttctcatgtgattcccaaacaacgctcagtgtcagtctcaatctcattatcttagagaagagaaaactaagaagcagagaaggcatgacttggtcaaaatcatcaggtggtaggaaggagagccagaattcgaaggaagatcttgttattagcaaatctattcactttctattaaaccacaccacccctcaagagtgtgtatatatatatatatatatatatatatatatatatatatatatatatatagaaaacagtattcatcaaaggttaattatcattgtcattattattatcattgacatcatcatagaattgataagatgatggcaaatagagatgaccaaaaccagaagacactattgagcaacaaaagaaggcatggagcatgcctaaattcactttacaagaatgtcatatagtaatacgcatatgtaaataaaatcttatcaataagcaaagaataaaaattgtgatatcaatattggtaagagtaaggtgacttggatgctttcatatactttcatagtaattgatacatccttttgggaaagcaatttggtaatttgtatcagaaacctccaaaaaaaacctagatcctttgttccagcaataccatttctagaaatctattctatagaaataatcaactcaaacatacatatatgtttaagcatgtttatttactatcagtaatatcaatatttagaaacattagaaaagtccaacattaagaatatgatttaataaattctaagcaactgttagaaatgaaaaagacttcattggcaaattcttaaaatgtaattttaaactcataaaataaatcatataaattgtatttataagatgatcccaaattttcaaaaaggacaatagaaagtgtatctgtatctagaaaaagctgatagaattcaagaaaacattgaccatgattactccgaggtcgtaagattacagattttttttagcggcttcttctgtcctgtattctctaaattatgtgcatatatttttcttatctgtgtatatatatacacacaccacacacacactatatataaaattctcagtcgcaaatatcttcttttcttaaaagtgttcatcaaaagttggtttatagaaaaggcattaattctagtgtaaatgttacatttctaatcttcacaagaatgaagtagcttagaattaatacaaatcagctttattctctacttctaagaatccttaaacatctctgtatcaaaggtctattaaacctccagcatggtcctaactttattaaattatcagttctttcaggcaaggtatctatcattatataatttgtgcaaatttgtatttgggtttgaatcccaacaccctatactagatgtgcgaccagagcaaattacaaatctttctaagtctcagtttttataatctctaaatggaaataatatggaaaccaacttcctatcgtcattgtttaggttgagatttaagtgaaaaaaatgcatgaagcatgtgacaaatagcaaaaacttattgcatgttattatctattgttattttatattccttattataccaggaacttgggcacgccaaaatgattttttgaagatgctaatgtagatctgaagtctaaatgacaggcatactcaggaggttttgagtgagcttaagattgaagaaaacacaagagaaaaccaaaaaacatgaacttcccttcacttgacttgacccaaatgcatagggatgggaagggagtggctgagaacacagagagattttcactaagtcacctcaaatactccttggactatcacatggaagcatgtgggttgtctaaatgttaacacaatgtctcttctttcctattgcagtatccgtaccgtcctgacgttttgaaacaatacagatgccttcccttgtagcagttttcagcctcctctaccctacatgatctggagcaacagctaggaaatatcattaattctgctcttcagagatgttaaaaataaattacacgtgggagctttccaaagaaatggaaattgatgggaaattatttgtcaagcaaatgtttaaaatccaaatgagaactaaataaagtgttgaacatcaactggggaattgaagccaataaaccttccttcttaaccattcaa

SEQ ID NO: 702 - DNA, 55993 bp, Homo sapiens
ggaggagcgcctggcagagcgggatcttcagggcagcgggcaaccccttggcccaggaagcctggaacgcaaggaccggagggcgtgggctgggacgcccctaccttggtctttcagggtaagatgtgggagctgggagggagtggagggagtcctatgtcaggacaagggggcggcagcaggaagtgcagggccgaggggtgctgtgcaggaaggaggagggacatgtggggtgcttcgctggtaaccccccttctggagtgacctcctggtgtggccgctttggatcctgctactttcattttaaaagttggcagcatgttgggccaggagtcaggggctatcttcccgagggaaatggcagggaagggctgaggatgaggacagagtaattccattcctcttccctgcccttcacactggctttccctccagccatcacgttctccccagcaccccctaccctcctaagtttttctaactccaactaagccagttcctagccctttgctgacctggacactggagaccacagccagggagacagtctccacttctacccgcaaggcggctcctccagagttatttgtttccttcttcctggtgtgggtatcagagagatttcactcaatctttcatttattcattagtgttcatttgtttattcatcactgtttgagcatatacctggattctctggagggagggctgcgcaatttctgctcctcttgggaataagaaaactgaaacttattgctcaaacatttgatggtcatctacaagctggtgggcagcatggcagagcagaaaattattttggagtcacaaagacacttggctttttatcccatatctcctgtttacctcctgagcctcagtttcctcagctataatttttttttaaagagacagggtcttgctaccttgcccaggctgcagtgcagtggctgatcatagcttactacaacttcaaactcctgtgctcaagcagtcttcttgcctcagcttcctgagttaactgaggcacggcggccagctcaaaatgatatttttatgaagatgacagggaacaatgcatgttgaataccaagctgggtgccaggctcattgtggagccttcctaaacacctgtgcttttcccttcctctttgactgccttcttgccatgcctctccctaaccagcaactccctcaccttaggcttgtaaagatatgctagacaacccctggccttgaaagcacgtaggcagcgtgtaaacagaactggccagtgacgggtggagtggtgaagggagagggaaggttgggttccatggctcgctcccagtgatttgggaggccgaggcgggaggattccttgagtccaggagttcgagaccagcctgggcaataaagtgaggccttgtctttaaaaaataaaataaaaaagaagggagagccacataggcatgggattagggaaggtgtcaggtgctggtttgtggtaaaaatactggaccagggctgagtccagacatgctgtgtttctgaatttgcacactcaacactgagcaagtgatgggaaccaccaattcctaaactatggatgcaggctaagggcttttaaatgcattctcttatttaatcataatcctcttatgatattattattaaccctattttatagatggggaaatgaagatacaaacaggttaagggatttgcctaaggtcacatggctaataagtaatggatccagaattcaagtctaggtcagactctaaactccatgctttttgctctggtgcttgctgtctttcaagtttctctgtattagaaagaccaggctgggggcggtgactcatgcctgtagtcccaacattttgggaggctgaggtaggaggattgcttgaagccaggagttcaaagccagcctgggcaacaagcgagaccctgtctcaaaaaaaaaagaagtcctggcacggtggctcacgccagccgtagtaatcccagcactttaggaggccaaggtgggagaattgcttgagtccaggactttgagactggcctgggcaacacagtgagacctcttctctacaaaaaataaaacaaaattagcctggtgtggtggtgtgcacctgtagtctcagctacttggttttttttttgaggtggagcctcactctgtggcccaggctggagtgcagtggcggcatccccatctcagttgattctctcacctcagcctcctgaatagctgggactataggtgcacaccatcatgcccagctaacttttgttgttgttgttgttgtatttttggtagagacaaggtttcatcatgttgcccaggatggtcttgaactcctggactcgagtgatccacctgccttggcctcccaaagtgtggggattacaggcatgagccaccatgcctggcccatctcagctactttgtaggctgagatgggaggatcatttgagcctgagacgccaaggctgccgtgagctgagatcaggccgctgcactccagcctgggtgacagagcaagactgtctctcaaggaaaagaaaaaagaaagaccaaaagggcatcagcattccccaactacctctctagacactggcctttcacttcctgtagatctgctctgggctgctgcatccagactccttccctgattcgttaactcattcactcattcctacatcattcattaaatcaagtgctctgtttatcccctgagactacaaagtttcaagagggcagggatcataagcatgatcctgttcattcagttttataatcctgttcgttcagcacctcattcattcctgatacaaaaattttcaatgaattctttgtgagtaaatgaatttgacaaatatttactgatgcattccatggactaggtaatagggagtcaaagatgaataatgcggaagccctgtcctcagaatgctcacagccttgtagaggagacagttataatacaaagaagacattgatgctctagatgcaaacagaggttgctgatggaactaagaagggcatttaattctaccatgcatcctcggtgcctaacacaatgctaagcatgtggtagatgctcagtaaggctttgcagaggagttgtaaaggacagagtcttttagttttgtttttctttaattaaaaaattttcttttcttttctttaacttaatcccaaatgtgatagtaaggaacagagtcttaaagggggtgttaatacttccctgggacaacaaatggggagtgtgggaggatgttctagcagagggaggagctcatgaaaagacctcatggagagtgggagctggaactgctaggggctcagtgtggctggggcatagggtatatttggggaaatggaaagaaatgaaggtggataaataggcagggttcaggtcatgaggtctttctgtgcctcgttaaggaatctaggctttaaaccaaagacattggatacccattgaaaagattttggctgggcgcggtggctcacgcctctaatcccagcactttgggaggccgaggcgggcggatcacaaggtcaggagttcgagaccagcctgaccaatatggtgaaaccccacctctactaaaaaaaaaaaattagctgggcatggtggcgtgcacctgtagtcccagccactctggaggttgagggaggagaatcgcttgaacccaggaggcagaggttgtagtgagtcaagattgtgccgctgcactccagcctgggcaacagagtgagacactgtctcaaaaaaaaaaaaattagcaatgagaatgacactacctgatttgcatttcagaagtgaggctgatgtgtaggggcctaggatatgaagacgccaaggttttcaggcctgatgggtccccacctatctatgaaaattagtcttcctttttaagacttcagcatggtttgttcatgaaggatctcttgagttggcctgttcctgatgactggtactttgccctcagctgtatactgggtcacagtgaatctgttcctcctaataaaagtttggaaatttataaatagtttccttttgtataatctggaataagttcaaggatactacttgcaataccttgtgctttcttatgccagagagctagagatggaggtgtagaagggtttccaggaattatatctagctctgagtgtgcccagtgagggtgtgtcaaactagccagtggtcctggaactggggatgcgggggcacagataacattaaaagagtccatttccagattctcagcttctgcagggactcttgcctaaaagtcatctgcttgtctggattcttttaagttctccttttcaactctgttttcattgtttctcttctttggctttataagaaagttacacctctgtccatcccaaattcattgaacaaggtccattgttcaaaaggacagttagagaatgctgtgttcctgagagatagcaagtaaagagagattaggcaggagaaactaaagggtgctgtgcctctactacagactcgtagtatttgttttatttaagaatactcggccaggggccaggcgcggtggctcacgcctgtaatcccagcactttgagaggccgaggcgggtggatcacaaggtcaggagattgagacatcctggctaatatggtgaaaccctgtctctactaaaaatacaaaaaattagctgggtgtggtggcgggtgcctgtagtctcagctacttgggaggctgaggcaggagaatggtgtgaacccgggaggcggagcatgcagtgagccgagactgtgccactgcactccagcctgggtgacagggtgagactctgtctcaaaaaaaaaaaaaagaacactcgagaatactcggccaggcatggtggctcacacctgtaatcccagcactttgggaggccgagttgggtggatgacttgaggtcaggagttcaagaccagcctggccaacatggtgaaacctcgtctctactaaaaatacaaaaattgctgggcacggtggctcacacttgtaatcccagcactttgggaggctgaggtgggtggatcacctgaggtcaggagttccagaccagcctggccaacatggtgaaaccccatctctactaaaaatgcaaaaattagctgggggtggtggccagcatctgtaatcccggctattcgggaggctgaggcaggagaattgcttgaacctaggaggcggaggttgcagtgagctgagatcgcgccattgcactccaactgggtgacaagagcaaaactccatcttgaaaaaaaaaaaaaaacccaaaaagcaaaaaaccaaaaattagatgggtatggttgcatgtgcctgctgtaatcccagctactcaggaggctgaggcaggagaattgcttgaacctgggagacagaggttggagtgagccaaggtcatgccactgcattccagcctgggcaacagagtgagactccatctcaaaaaaacccccaaaaaccaacaaacaaaaaagaatacttgtttattcaacctgaggaagctgattaagtaaagccagaaaataaaacataaaataaaaataaagaaataaaaatatttgtttaggctgggcacagtggctcattcctccaatcccagcacttaggaaggtcgaagtgagaggatcacttgagcccaggagtttgaatccagcctgggtaatgtgacaagacctcgtctctacaagatttgctgggcgtggtggcatgtgcctgtggtcctagctatttgggaggctgaggtgggaggatatcttgagcccaagaggtcgaggcttcagtgagttgggtttgcatcactgcactccagcctgggcaacaaagcaagaccctgtctcaaaaaacacccaaatagggccgggtgtggtggctcatacctgtcatctcaatacttcagggggccaaggtgggcagatcgcttgagctcaggagttcgagaccagcatgggcgacatggctaaaccctgtctctacaaaaaaatacaaaagttagccaggtgtggtggtacacacctgtagtcccagctacttgggaggctaaggtggaaggatagcttgaacccgggaggcagaggttgcagtgagctgagatcatgccactatactccagcctgggtaacagagtgagaccctgtctcaaaacaaaacaaaacgaaaaatttgctcaatgctaattatgtgccagacactcttctaagaattttacagataataaactaattcaatactgataccgaatctataaagtagatatttaccaccctccttttacagatgatgctcccaaggcacaaagaggtttaataagttgcccaaggtcacagaggtgtcaagtggtgaaatcagaatttgaattcagacacctttgaattcctctagaatttgtgttttagccattatgctatattaaacttaagagctttagctctttatttatgtgttataaaattagaattgagacatgagccagttgtcatggggatgcaaattaatgcatttatggaaccttttaaaaataaaggtagattttcttatggacagaaaatctctttgatttggctaattggtttgacagtgaggacaggctttgccaactggattatgtggtagacattttccataaactgaacaagtgaaatctgtagctctaaggtttggatgaaaatgtatttaaaacatgtctctaacaaagactatgacaaaaaatttgatcttggagccgattttaacttgtaaaaaataattgtagttattaacttaaaaatgtatgagacagaacagagcttctttaaaaaaattttttttttttttgcgactgagcctagctttgtcacccaggctggagtgcagtggcatgatctcagctcactgcaacttctgtctcctgggttcaagtgattctcctgcctcagtctctcaaatagctgggattacaggtgcctgccaccacacccagctaatttttttgtatttttagtagagacggggtttgactgtgttggccaggctggtctcaaactcttgacctcgtgatctgcccgcctcggccccccaaaatgctgggattataagtgtgagccaccgcgcccagccattttttttttttttttgagacagtcttgctctgtcactcaggctggaatgcagtggcgcgatctctgcattgctcactgcaacctccacctcccgggttcaagcgattctcctacctccacctccgagtagctgggattacaggtgcccatcacccctcctggctaatttttttgtatttttagtagagacggggtttcactatgttggccaggctggtctcgaactcctgacctcacgatcttctggcttcgtcctcccaaagtgctgggattacaagtgtgagccaccctgccgggccattttatttttatttatttatttatttttgagacagtcttgctctgtcatccaggctggagtgcagtggcacaatctcgactcactgcaacctctgcctcttaagttcaagcgattctcttgcctcagccccctgagtagctgggattacaggcacccgccataacgcctggctaattttttgcatttttcatagagatggggttttgccatattggcaggctggtcttgaactcctggcctcaaatgatccacccacctcagtttcccaaagtgctgggattatatgcgtcagccaccacacctgacattcttcaaaatttttatggggatttatgaagacttgtggacacagcacggtggataactcctgtaatcccagctctttgggaggccaaagggggtggatcatttgaggtcaggattttgagaccagcccagcctacaagtgaaagcccatctctactaaaaatacaaaaattagctgggcatagtggtgggcacttgtaatcccagctacttgggaggctaaggcaggagaattgcttgaacctagaaggcagatgttgcagtgagccaagattgtaccactgcactccagcctgggcaacagagcgagactctgtctcaaaaaaaaaaaaaaaaaaaattgtgaagacctgtgaggtatgacactgataaacatcgccggccatgtgtttgctggtggggatgaagtttctggttaggtgaggggaagtagcttatccgtaggtaagcaggggcagaattggagcaaggaccaggattttctgactcctgcaatgtcagagctctttccatgatacttcccttttccttccttctccattcatgggattgttaattcagcaaatacttgctgagaaatattttccacttttgtggaggtcatattctagcagaaagagacagacaataaataaactaactatttttagataatgataagtgctgggagaatataagtggggaaatgtagtagagcatataggggtgcgggaaggcatgggcaggggagacttcctagggacgtgctacaggttatgaaggatcaagaccaaccttgtgtgtatgagttgtagggaagggagagggctaggtagaaggaacagcaagtacaaagaccttgagacaggagaagatttggtgtattccaggaacagaaagacgtccctgtggctgcagcactgagtcgttgggagaaagtagtagaaagtgaattccacaaagaaggtaggagctaggtcatataggatcttatcatttgccattaggatcctatatctatcccaaagacaatgggaaaccattgaaggatttttaagccgagagttaatacactctgatttacggttttgttttgcttcattgttggagggaggcaggagtggaaacagagtgaagactaatttgggagggtaatttcgggtcagacatcagtaatctactcaatggaagaatacaaagatgaacaatgtgaatggaaagaaaggcagaatggtgtgagatgtcattctgtcttctggttctgatgaggcatgctggtagctattactgtgtaacagatcaccccaaaatttagtgactcaaaacaagaataggtgtggtggctcacgcctgtaattccagcacttcaggaggccaaggtgggtggatcgcgtgagctcaggagttcaagaccagcttcggcaacatggcaaaaccccatctctacaaaaaatgcgaaaattagttgggcatggtggcgctcacctgtagtcccagctacttgggaggctgaggcacaagagtcccttgaactggggaggtggagcttacagtgagctgagttcgtaccactgcactccagcctgggcgacagagtcagaccttgtctcaaaacaaacaaataacagaaaaaccaagagccattttatttcttcataattatgcaagtcagggatttgggcagggttcagctgagcagttcttctccatgtagtcatcagctagggtcattcacagctgtattcaactggtggatgagctgggctggtaggtcaagaaggttccattcataggtctggcaccttggtgcttttctttatttcattttcacatgactttttctttttttttttttaaatcaggcaacctcctgagccagaccaggctcagagagactcctacttttgtgctcttctacatggcctctctttccatgtgggcaccttgggctttctcatagaatggtggcctccaggtagtgttaggttatatggtgttaggcttcaaagaggaagcattcccaaaggagcaaaagtggggaccacatagctgttaaggcccggccctgcaaagtatccagcatagcttctgccacgtagtattggtcaaaaccagtcacagggctggcccagacttaaggagaggagaaacaaacccaaaccatatctctcagtgagaggaatggcaaattatatgctccgtctttagtctaccatccttggcttctgggaactgaatagccctaaccatgctgatggtgctgacccacttttaaatctaaaccacagtatactatgttggaacaatttataggtctttattccccagtgaatagagagggactggagaacaggaggtggtttccttttctttctttcttttttttttttcccatgtgtttccagagcctaacacatacaaggcattcagggaatgctaccactggatgcacacatcacataagcattcactggtagttgaaacatgatgtatataagaatcccctgggagctgttaaaaaggcatgcagatttcttttttcttttttcttttcttttttttttttgagacggagtctcgctctgtcacccaggctggagtgcagtggcgtgatctcggcttactgcaagctctgccttcctgggttcacaccattctcctgcctcagccttccgagtagctgtgactacaggcgcccgccaacacgcccagctaattttttgtatttttagtagagacggggtttcactgtgttagccaggatggtctcgatctcctgacctcgtgatctgcccacctcggcctcccaaagtactaggattacaggcgtgagccatagtgcctggccgcctgcagatttctgaacaagacctgagcccagaccctctgaatccaaatctctagggcagaagttttcagtcttggctgtacatgaaaagatacaagtgccaggccttcaccccagagacccagtttctgttgatccggggtgaactcaaacacatttaagtctcttcagatgattctgatgtgaggccagggtgaagaaccagtgccctaggattagaagcagccatctctgctaacctccccagatgattctgatgcaggtggtccatgacagggtgaccaacacccttggcttgccctgattttagcactaaaagtctcacatcccaagaaactcctagtcctgtgcaaaccagacagttggtcattatcagtggaccactattgaaaaaaaaattctacacgaagcagtgaaagccttttttgagaaatgcccacaaatatctactgaaagccatgattttgtctccttacttaagggcctgggccaactgtccttgaattaagggggaagtggctcagggtcactgttttccttcagccctgtgctctggtgtgctaggtctgttaactcatgtaaatagtgtgtctgtctttgggaattctttcagactatatcccttagtgcgcacaccacagctttgaaagcccaatcaccatcaacaaagatgatgtgtttaggataatacaagatacaggatgaaattcctatgtcttctgcaccattgtgtattattattactattacaaatactataatagggtacacaaatatatgtaatatgttaaatagctgtggggcggcccagactctggtctgagattcccaggtttgtgccccagctttgctgtacctaggtatgtaatcatggatgcctcttttttgccctagttatttacctgtaaaatgggaataataaagaggtcttcacagagcagacgggaggatccagaaaataataaaagcgaaagtggttctgtagagtgagaaggctgagtattatgatggtctttgaatgggaaggacttgaagacattattccgccgagaggccctgcatgtgactggggctctggtccccctaccctgaaccatagcccacctgtgaagtttcaaggaagaaacttttgacgcagagtggaccatggagagagctcaggaagcagagttctctaccttagctgcccttactgctgatgtcaagtgtgctttgcttcagcaaaaagcaaagcttttggaaacgggggtttgtgaaggcattttttgttttcaaatcttttgcctatttattccaagtgtatcctcagaaatgcagccaaaagaaaacaaccacaaccacaaacctgtaatattgaaaagccagttcttaatttctgtagctaaaaaagcatcctttcaggctgtaaccacagagagattgctgcaggcctctggcataatgatggtttgcagtgtgatgaaggaggctgctaagctctgtggcccagaagtccaatcctggcctctccaattacccaggcgcctagcaacaccaccgaaagtctccctggcagccccagctgggcagcaattggctacacccagcacagcccgctgcccagcctcctgagctccccagccacatcaaggcgggtctcagccccggcaggggcctgcctggtaccaatgaatgggtggggccagctgtttagaaaaaacaattcagatatttaaaacctccctgtttgaatgcagctaggcaagcggcacaagctcacaactaaaagtgtctgccatggaaaaggagttgtcataagggtgttggccttgccagggccttcctgggtgaggcgaagaagggaaggtgagcctgatttagtcctctggcttctcaaagaggcaaatccttttcccgtcctggacgcttgtgtccacctagagtcctcgtcgtagcagtggggatggtgggaattcccagccccatcttctcccaggggtagtgacctgccacttcctctacagcttccgttcgggaattcacagggtctagtctgggactgtctaggcagctggaggaaaaagagggagctaagagtacaggaaaggatgggatgaaaataaccaaaaagaagattcacacttcttttgtttaaatttttatttttatttttatttatttaggttttggagacagggtttcgctctgtcacccaggctggagtgcaagtggcaccattgtagctcactgcaatcttgaactccccgtttcaagtgatcctcctgcctcagcctcccgagtacctggaagtgcaggtgtgcacaccactgcacctggcaaactttaatttttaatttttttttgtagagaaaggctttcgctgtgttgcccaggctggtctcaaactcctggcctcaagcaatcctcctgcctcggtctctcaaagtgctaggattacaggcatgagccaccatgcctggcccattattttttatttaaaattttttttttacatggccaggcacagtggttcatgcctgtaatcccagcacgttgggatgccgaggcgggtggatcacctgaggtagggagttcgagatcagcctgaccaacatggagaaaccccatctctactaaaaatacaaaattagccaggcgtggtggcgcatgcctgtaatcccagctactcgggagggtgaggcaggagactctcttgaacttaggaggtggaggttgtggtgagccaagatcgtgccattgcactccagtctgggcaacaagagcgaaactctgtctcaaaacaaaacaaaacaaaacatggccgggcgccgtggctcacccctgtaatcccagcactttgggagcccgaggcgggtggatcaagaggtcaggagattgagaccatcctggctaatacggtgaaaccccgtctctactaagaatacaaaaaaattagctgggcgtggtggcaggcacctgtaatcccagctacttgagagactgaggcaggagaatcgcttgaacctgggaggtggaggttgcagtgagccaagatcgcaccactgcattccagcctgggcgacaaagcgagactccgtctcaaaaaaaaaaaaaaaaaagaaagaaaaaaatttacattttaaaatcttcaatttatttatttatttcagagacaggatcttgctctgttgccaaggctggagtaaattttcatttttaactctaatcccatcacagttgaaggagtacctttctataacacttggtgcgtagaaatcacaggggctgtggaacatgtgggggctttggagtcaggcgcccgagactcttctcccagccctccccttattagctgtgagaccttgagtaagttactttgggagcctgggtttctttatccttaaaatgggaatattattaccctgctttacaaagtggtaaaaattaatgaagacaatgctcataaagtgtttagcctggatgctggcacacagtaagtgtttattattctagtacctctttattattttatttgattcttaccacaattctgtaagatactcagggcagaggtgagctctgttttacagctgaggaaactgaggcccagtggaaaactaaatgtggatgctgggagtagaattcaggtctttatagtgtcaaacacaaggcaggctattcttcaaaggcagatggcaagccctttttttggtagccattatgacatggcagcttcacagtgatggtgcccagtgatggtagaatgataatggaagtggtgcggccttgcagaggaaaaggttggtaggaggctcttttcttttctttttttttgagatggagtctggctctgtcgcccaggctggagtgcagtggcgcgatctcggctcaccgcaacctccgcctcccaggttcatgccgttctcctgcctcagcctcccgagtagctgggactacaggcgcccgccaccacgcccggctaattttttgtatttttagtagagacggggtttcaccatgttagccaggatggtctcgatctcctgaccttgtgatccacccgccttggccttccaaagtgctgggattacaggcgtgagccaccgcgccctgcccggtagaaggctcttttcaacataaagtcacacaaagacttagtcaatgtgtggttggaattcctccttcccccttttccctcctctctttctctccctgtctctttccctccctttcttccagaagcattccttttaaaaaacatttttaaaaaaataactctgatgttttgtatggaatgcttcacgaatttgcgtgtcatctttgtgtagagaccatgttaatcttctctgtattggtccggtttttagtatatgtgctgctgaagcgagcaccacaagcattcttttattgattgattggttgagatagggtctcgctttatcactcaggatggagtgtagtgccacgatcttggctcactgcaacctccacctcccgggttcaagcgattctcctgcctcagcatccccagtagctgggattaaaggcatctgccacctcacctggctaattttttgggtacttttcgtagagatggggttttaccatgttggtcaggctggtctcgaatgcccgacctcaggtgatccgcccgcctctgcctcccaaagtgctgggattataggcgtgagccaccgcgccctgcccgagtcaggtttttttattgcaaaagatgggaactgattctggctaattaaatcaggaaatgaattttattgaaagcacattgagtaagttacagaatcacttgaaggctgtagaaacaaggcttgggaaaaaagcagaaacagagaccaggtacctagaattacaccaaattccatcacagagccagataggtgaggacagcctcagtgctgctgctgctgaacgcccagtgctgctgcctttgtcacagccacagctggcgttggatgctggatgccatgctgaccccagtggcaaggcgtctggacactggatactgctgccactgctgcaaccactgtaaagaattttttccatcctcacctccagcctcagaaatcctaagcaaatgcagctgattggtcaagctgccctagctgcctagggacatgcaaaagtgaatattgggcatggttaatgtctgtagtgggatccgtttcctgctgcccaccaggagaagataaattccccaagaaaactgacaaatgacgactacgtacatgttgtcaaagaatccactggaagtctttgacatttgcagattcaacacttgcaattttggtaatttattagttactcccaaaggcccattataaatgaatatgagttgaatgattggctttgcctgttagtgagccaggcctactgctctgcctggatatctcacatgactgttatcctttatgtagtttgcatgcagtgattaaaatatttgtttcttgtttgcagagtagaaaagattcataaaataaataatccaatagtgccagtgatataaacaaagagaaagtggggaggtataagacagtaactttgttttttggctacaaatagaagttttggataaattggcatgctgtgtcaagttcagtggtgtctaagatccctgatatcattagatccaccatgtgtgtcactgagatacaaggaaaagttgttcagtgagtgcatcagccaggctgctcatcaagagagagattaaccttttttttttttttgagacagaatctcactctgtcgcccaggctggaatgcagtggcaaaatctcagctcactgcaacctccgcctcccactgcaacctccacctcctgggttcaagagattctcctgtctcagcctcccgagtagctgggattacaggcacatgccaccactgccggctaatttttgtatttttgctagagacagggtttcaccatgttggtcaggctggtctcgaacgcctgacctcaagtgatctgcctgcctcggcctctcaaagtgctgggattacaggtgtgagctaccatgcctggcctggctatactttacaatgtaattttgggagacactatgtggtatgtagtgcattagggcatctgaaaggtctggaaaaatctcttgcaaatgtcaggagtctcctatgtaaatctctttatagaaatctcttttcggctgggcatggtggtttaagcctataatcccagcactttatgaggcctaggtggatggatcacttgaggtcaggagtttgagaccagcctgaccaacatggtgaaaccctgtctctactaaaaatacaaaattagctgggtatggtggtgcatgcctgtaacttcagctacttgggagtttgaggcaggagaattgcttgaacctgggatgtagaggttgtggtgagccgagatcgcaccattgcactccagcctggcaacaagagcaaaactcaatctcaaaaaaaaaaaaaaaaagaaaaaagaaatctcttttcaacagattttttttttaaggtagtcaattgtcctgagtaaatgagcacagtcctgccctttcaagtctttggccaatacactggctctgtgattgttaacaagtaatgcttattctaggcaaagtcaggaagtagcaaagttccttccgtgtttccttgttttttttttgagacggagtcttgctctgtcgcccaggctggagtgcagtggcgcaatctcggctcactgcaacctccgcctcctgggttcatgctattcccctgcttcagcctcccgagtagctgggactacaggcgcccgccaccacgcctggctaattttttgtatttttagtggagatggggtttcactgtgttagccaggatgatctcgatctcctgaccttgtgatccgcctgcctccgcctcccaaaatgctgggattacaggcgtgagccactgtgcccagccctgtgtttccttttaagagtacttgtggccaggtgggatctttctatgtttcctcttgagaatacttgtggattacaggctctctcacacctgtaatctcaatgctttgacaggtcaagcagggaggatcccttgaattcaagggtttgagactagcctggacaacatggggaggccaccatttcaaaataataataataataaagtttaaaaactttttttttttgaaaaaagaatacctgccaaccatgaaggaaagggttttggttcttttctctccctccccaatccttagaacccatgaaagggttttggttcttggtgtgcataaggaacatttccatttttaaccagaaggctagagacattctaacaatctactcagttgttccctacctgtaggatgagaacttctcgcagcagtgccacccagttttgatctgtgtatgcgaggcctttcaaaaaagagtgggcagcaacttgctgcagataagaggtaggaggtttgcttagtgagtaagaaagcagagtcagtgcagtaaatctccacccagtgaatgacacccaataagtgagtgctcgagtgccaagtaaatgaatggacagatgttgatgcttgaatatttctttgagactagaatgtgttgtaatcattattttgttttgagactcctgctccattcaattgggcttccaaaaattctggtaatctgacgtgtgtttctgaacgctgtatcccaagtttgacctatagagcccatggagtttatatacaggccatgcccaaggaaggacaaaattaatgacaacatgaccttcgattagatttgctttgtgaggctccagggagggaaaccttggacccaggagctggtgaatagattccagcagtgtaaggaagaactacccatgaattagaactgttagaaaatacagcaaccccgctgaagtccatctaggttgtttataattcttcatggctatgaatagttctgcatgaatatccttgtaatataccattgtgtatgtgctcaaatacctttgaagggtggatttctagaggttggatgtttctgttgaaaggtatatgcttttaatagtttatacacattggccaattgctttccaaaaggctgcattaatttatacctcatacattgcacccattgccacacacctcataaatatgggatattctcagccttttttttttcttttttttgagatggagtttcactcttgtcgcccagggttgagtgcaatgacacgatatcagctcactgaaacctctgcctcctggtttcaagtgattctcctgcctcagcctcatgagtagctgggattacaggtcttgctaccatgcccagctaatttttgtatttttaacggagatgggtttcaccatattggccaggctggtcttgagctcctgacctcaggtgatccaccgacctcggcctcccaaagtgctggtattacaggcatgagccactgtgcccggcctaagtctttttcattgttaccaatctaataggtaatatttcctcagaaattcaggagtggggcagaagataaacgtgagcgggagagatgaggaaatgttagagactggaaggagcacctgtgagcattatagcaccaggtattggagataagataaatcagagagaggcccctgttctcaggaaacagggtggagaggtatggaagttggaggatgatagtaattgagaagagaggtaaaaccaaaatgcagtggctcacacttgtaatcccagcactttgggaggctgaggcgggaggatcgcttgagcccaggagtttgagaccagcctgggtaacacaagaagaccccatctcaacaaagaaaaaaaaaatagctgggtatggtggtgtgtgtgcttgcagtcccagctacttgggaggctgaggtgggaggctcacttgagcctgggaggtagaggctgcaatgagccgtgatcctgccactgtactccagcctgggtgacagggagagatcttgtctcaaaaaaattaaataaaaaaaccccaaatgtttctaattgctagtaatgtgctcatttggtgctagagcctgaagtagctagaactacatgtctactttacaaggcaaggcagaaagcagacatgcagtgagttttggctaaaccggttgggtcaactatctttgcagcacaggaaatatatttaggcactaacatatttaaaatggtggtcttgaagttgtaaaatttctggaactgttgaaatcccaagataagggcaaatgtaatccttatttttgtagctccttttatacagttgtattgttaacaatgtgacattttatttcctcataaaatgattatgtatgatatttagatacaaaaaggctgatttatacaatgtgaactgtccctaattgaacttatttttaaaatgctttaatatttgtggttaaaagctgctgatcttaaatccacattgtagttttgtcaattatgagacgtggcaaaaagtagaaaaaaatcatcagtcttcaagggaaattaataaaagagttatatctatggactgaatgtctgactctgggaggcgggtgagtgggtgggtgaaaaatgcaggggagagaaaaagcctttattttcagaaaatttgctggggaaaagaaaaataagatgtctcttcctcaatttattgaatataacctattctaatgtgaaaacttgcctaatgagtttcatttgaaaatcagttgaatttgatctgattcccagtaacatgcagtgtgaaaacaggcgccaggctcagctccatgccttccatctatccatccatccatctaaaactcattcatccatccacagccaataacaactaataattatagggtgtttactacgtgccagatacagttcttttctttttcttcgagacacagtcttgctccatcacccagtctggagtgcagtggtgtgaatttggctcactgtaacctctgcctcccaggttcaagcgattctcctgcttcagccttccttcagctggaagtacaggcacgtgccactatgcccagctaatttttgtatttttagtagagatggcgtttcaccaggttggccagtctgttctgaaactcctgacctcaagtgatgggattacaggcgtgagccaccacgcccggcccagatactgttttaagtgctttacatgcattatctcaagtaagcttcccggcaatgttatgaagcaagtgctatcattatcctcagtttaaaatggaatctgagggtttcccaacaagttaaacatagaattaattaccatatgacccagcaattccactcataggtatatgctccccctcaaactggaaactgatgtttaaagaaaacttgtgccaggtgcggtggctcatgcctgtaatcccagcactttgggaggccgaggcgggcggatcacgaggtcaggagatcgagaccatcctggctaacatggtgaaaccctgtctctactaaaaatacaaaaaaaaaaaaaaattagccaggtgtggtggtgggcacctgtagtcccagctactcaggaggttgaggcaggaaaatggtgtgaacccgggaggcggaggttgcagtgagccgagatcacaccactgctctccagcctgggcgacagagcgagactctgtctcaaaaaaaaaaaaaaaaagagaaaacttgtacagggatgttcacaatagcgaaaaggtggaaacaacccaaatgtccataaacagacgagtggataaacaaaatgtggcgtgtctatacaatgcaatagcattcagccattaaaaaaaggaaattctaggccaggtgtaatggctcatgcctgtaatcccaacactttgggaggccgaggcaggtggatcacttgaggttgggagttcgagactagcctggccaacatggtgaaaccctgtctctactaaaaatacaaaaattttctgggtgtggtgccgggtgcccataatcccagctacttggtaggctgaggcaggagaatcgcttgaacctgggaggcagaggttccagtgagccgagatcgcaccactggactccagcctgggtgacagagcgagactacatctcaaaaaaaaaaaaaaaaaaagaaaacatgtgaaggaagccaaccacaaaaggccacatactggatggtacatatgtattgtatgatttcatttatgtgaaatatccagtataggtcaatctatagacacagaaagcagattagtcgttgccagggactgtggtaagaggagaataggaattaactgcttaacaggtatgggtatggggtttttgtttgtgatgaaaaagttttggaactagtggtgatggctgcacaacattgcaaatgtactcaatgtcactgaattgtacactctaaatggttaaaaacagggccggcttcggtggctcacgcctgtaatcccagcactttgggaggcctaggcgggtgaatcacttgaggtcaggagttcgagaccagcctggccaacatggtgaaaccctgtctctactaaaaatacaaaaattagccagggagggtgaagcagaagaattgcttgaacccaggaggcagaggttgcagtgagctgagatctcgccattgcactccagcctgggcagaagagcaagatgactccacctcataaaaaaaaaaagaaaaaatatatattatatattaaatggcgaaaatggtaaattttatgttatgtgtatttcaccacaatttaagaaatatgtaatttgaggcttggagaatttaattaagtgatttatctgatgttaacttacagctgatacatggtagagctgcattttaatctcagtcatctggctctttttaaaacaattacatagaaaactttattttgggccatttaggaggtttagatcattttgatcatcttcagctgtcttctcttcacatacaggaaaggccttggaaagcagtcgttgcgccagacagcccagggaagagcggcagcctgaggacctagggccacctgctgttccctgggattcatgtccttctggggaggagggaggacccaggacaatggctgctgttcatgatctggagatggagagcatgaatctgaatatggggagagagatgaaagaagagctggaggaagaggagaaaatgagagaggatgggggaggtaaagatcgggccaagagtaaaaaggtccacaggattgtctcaaaatggatgctgcccgaaaagtcccgaggaacatacttggagagagctaactgcttcccgcctcccgtgttcatcatctccatcagcctggccgaggtgaatggggagcggggtgggcaccggggtaagtggcatggggaagctgggaacaaactaggggtcagatctagatctagagaagagactgggaacatgggagagagcttcgtggggatggggacagcacacacctcacctctgcctctgctctccccacagctgcctttgaggctttccctatactcacggtcactgccaacccagggtggagtttcatttgtcagacaaatctgcccagctgtggctgcaatttcagtggcttcctttcattttagttgtgaggtctttaggaagcaaatcattctggggttgcacaagggctttctctcatgaaccgatttaggctggttggtaaggcatttctgggaccccaggtttagaagtgttatagaattcttctgaatttcagtaggaaaaaaacgggatcctttaacaatgtctacttcaggcagcacgtggtgtgttttcaggctctgatctagtcagtcctcttgttttccagaaaagactgcaaggctcagagaggtgggatgactatcccaaggtcacatcatagtcactgggccaggatgaggctcccctgtacctcgtggcacctagttttttcccccacacttgatgtcctataaaggaactggccaaccatggctgcctgtggagtgtgacttcaggggcattaggaagttcctaatgtaacccttttagttcccactgatgcactgatgcctcagcttccttatcacaaactgtattagtcaagagttcttcagaaaaacagaatcaataggtgtgtgttccctgggggaagagagattaatatttattttaaggaattagctcaaatgattatggagacttggcaagtccaaaatcttcagggaaggctggcaggctggaggcccagggaagacttgccattcaagtccaaaggtagagttctgctggcagaattcccttttcctaacagaggacaatcttttctctagcaaggccttcaactgattagacaaggctcacccacagtatggtgggaaatcggctttactcaaagactactgatttaaatattagtataaaccataccctcacaaaaacacctaggataatgtttaagcaaatgtctgggtagcatagcctagctaagttgacacataaaattaactgttgcagggaccaagcctcttatggctcagacaaaggtaaggctaaggtgtaagcatcctgggagatgctgtggtcaagtctgtttagggtgaaggggcacagttctaatttttttcacaggatttcactgtgagactgcttgcaactgggaagtcgtccggatctgagacatctgtatctgttttttctgcttctccttcctgttatccttctggcctatgggttgtcttgtgtttcaatcagctgtgtgtgtgtcttgtccaggtgaatggggaacaatgagataaggtatcgtggtacaaacctcaattgcctaggcaatgagtgctatggaggagggcagtttgccataggaggctcatggagcagatgctgagatacctgcctctcacagaaagaccaatttttaaattaaaaattttaattttggaataattttacctctatagagatattgtaaagatagaacagaaagttcctgtaggccgggcgcagtggtgcacgcctgtaatcccagcactttgggaggctgaggtgggcggatcacaaggtcaggagattgagaccatcctggctaacacggtgaaaccctgtctctactaaaaatacaaaaaattagccgggcatggtggcgggcacctgtagtcccagctacttgggaggctgaggcaggagagtagcgtgaacccaggaggcagaacttgcagtgagctgagatcacgccactgcactccagcctgggctacagagcaagactccatctcaaaaaaaaaaaaaaaaaagaaagttcctgtatgcctctcacccagtttctcccattgtttatatcctacatttccatagtacattgtatttttttcttttttttcaaacccaggataatctctgtatatagtacattacatttccatagtatttttttttttttttgagatggagtcgctctgtcgcccaggctggagtgccagtagtgtgatctcagctcactgcaacctccgctgtccagggtcaagtgattctcctgactcagcctcccaagtagctgggattacaggtgtgcaccaccacgcctggctagtttttttttttgtttgtttgttttttttgtatttttagtagagatgtggtttcgccatgttggccagtctggtcttgaactcctgacctcaggtgatccacctgcctcagcctcccgccaaagggctgggactataggcatgagccactgcgtctggccccatagtacatttgtcaaaactaagaaactgacattggcatattcctaactaaactccagatttacctggatttttaccagtttctccattaatgtcctctttctgttcctctggtacccactccatttagctgccatgtctacccaggctcctctgatctatggcaacttctcagtctttgtttttcatgactctgatagtcttgagggggactggctagggatcctgtagaatgtcccccagctggggtttgactgatgcttttctcgtgatttaactggagttatgagtttgggagaagaataccacggaggtgaagggcccttcccatcacatagcctcagaaggttgaggacatcatgtggcatcactgggacattcacctccatcccttggttaaggcagggtttgccaggtctctcccctggcaagtgactatttttccctttccctgctctattattcggaagccagcattgacctactttcatagcaagttgtaaatgaaagatcagttggtgcgacgatgagggcagtgggtatttaagagggagagggtagtagagaacgtagtgccagagagcagggtgtccaagagcagggcaaaaggggttcagaaagtcttccttacaatgtgagctagcactgctcccaaccatcagaggaagtggggtacggtggaaaccatcacagaggggatggtgaagaagtgtatttcatgtcaccttctggcactatggtgtggcccacttgagagctgaatcatctgaaacagttactgcccacgggcttggatggggcccctctctggagaaggtgtggttaatactcatgtctgctccctccatcagctggcagtgtttatttactatgctgtgtggaagcctcagaaacagtggatcacgttggacacaggcatcttggagagtccctttatctacagtcctgagaagagggaggaagcctggaggtttatctcatacatgctggtacatgctgggtaagcaatgatagttaagcccctggtatcagaggtgattatatcattgtaacctctaacatttgttgagtgctttattattgataaggcactttcatgtccataatcttcacagcaaccctaaggggtaggtattgctcccactgttttatgtctgaggcataggagatgtagtcatggaggctgaggtgggcagatcacttgaggtcaggaattcgagaccagcctggctgatatagtgaaaccccatctctactaaaaataaaaaaattagacaggcatggtgatgcatacctgtagtcccgggaggctgaggcaggagaattgcttgaacctgggaggcggaggttgcagtaagccgagatcgtgccattgcactccaggctgggggacaagagtgagactccatctcaaaaaaaaaaaaaagatgtagtcacttgttccaagtcacacagctaagttgcagagctaggacctcagcccactagtgctaactctaaggccagcatcctttcttacttttttttttttttgagatggagtctcgctcttgtcaccaggctagagtgcagtggtgtgatctcggctcactgcaacctccgcctcctgggttggagcgattctcctgcctcagcctcctgagtagctgggattacaggcacctgccaccaggccgggctaatttttatacttttagtagagacggggtttcaccatgttggctaggctagtcttgaactctgacctcaggtgatccatccgccttggcctcccaaagtgctgggattacaggtgtgagccactgtgcccttaaggccagtatactttatattgcattataactgcccaatattagtatttaggaatattaatgagaagagatcaaatcattgcaaaaccaaaagcatgttcccctagttgtctaatgttgttaaatatactctttaggctatgaaaatggtggtgctgaataaccagtctcctcctccaccatcatacatcaaacaaaatttagttcatggccgggcacagtgcctcacacctgtaatcccagcactttgggaggctgaggtggatagatcacctgaggtcaggagttcaagaccagcctgaccaatatggtaaaaccccgtctctactaaaaatacaaaaactagctgggcgtggtggcatgcgcttgtaatctcagctactcaggaggctgagacaataaaattgcttgaacccaggaggcggaggttgcagtgtgccgagatcgcgccactgcattctagagtaggtgacagagtgaaactctgtctcaaaaataaaataaaataaatttagttcatgaacatattgatgagtgtgggatactgttatccatctggaataatactggtaataggagatgcagtgcccgccatttagttttgcctacagtttctttctttcttttttttttttgagatagagtctagctctatcgccaggctggagtgcggtggtgcgatctcggctcactgcaacctctggctccctggtttaagccattctcctgcctcagcttcccgagtagctgggattacaggcacgtgccaccacgcccagctaatttttgtatttttagtagagacggggtttcaccatgttggccaggatggtctcaatctcctgaccttgtgatccgcctgccttggcctcccaaagtgctgggattacaggcgtgagccactgtgcccggccgcctatagtttcttaaatgccgatggcctttcatgaactcactcagcatccatgatccaccatgcccactgcagacagcgagcagcttcctgttggccccacctatccggtggactcttgtggtctcaggtggggccaaccttttctgtgcagtctacccaactctggacttgaaaacgacttgtagctggggtgtggtgatgtgtacctgcagtcccagctacttgggaggctgacgaaggaggatcgctttgagtccaggagtctgagaccagcctgggcaacatagagagtgctctacaaaaaaaaaaaaaagttaaaaataaataaaaaataaaatagaaaggatgacacttttgcttagtggctaaataggcatcaggacacatggctcagaggcttgacaaatcaggggcaaaatcaccaactgctcagtttccatttaacaagtatgttctgagcaaacatggctcccgcacacaaggactttaagatgataagaaggaacatgtcagttaaatagcaatgtaaggcagtacagtattatagtatatagtaggctgggtgcagtggctcatgccttgtaatcccagcagtttgggaagctgaggtggtcacctgaggtcaggagtttgagaccagcctggccaacatggtgaaaccccgtctctagtaaaaatacaaaaattagctgggcgtggtggcaggtgcctgtaaccgcagctacttgggaagctgaggcaggagaatcgtttgaacccaggaggtggaggttgcagtgagccgagatcgcgccaccgcactccagcctgggtgacagagtgagactctgtctcaagaaaaaaaaaaaaatacacacacacacacacacacgtgtatatgtaaatacacacacacacacacacacacacacacacacacacacatatatatatatatatatatatatatatggtatatggtagttacttagcttccttgtcctttagtttcctcaggtgtaaaatggagtaatatgaatagtacctacctcataaagttgttgtgattaaatgagataatggctataattttcactgtgcctaacacatagtaaggcacttaaaaagaatctgtggccaggagcagtggctcacacctgtaatcccagccctttgaggggctgaggtggatggattgcttgaacccaggagtttgagaccagcctgggtgacacggtgaaaaccccatctctacaaaaaaataaaataaaataaaaaattagatctgcacagggtgtgtgcctgtagtcccagctgctggggaggctgaggtgggacgattaaggaatcctcaggcccaggagatggaaatgtagtgagtcgaaatcgagacactgcactctagcttgggtgaagggagtgaaaccctgtctcaagaaaaaaaaaaaacgggccaggcgcggtggctcatgcgtgtaatcccagcactttgggaggccaaggcgggtggatcaatgaggtcaggagttcgagaccagcctgaccaacatggtgaaaccccatctctactaaaaatacaaaaattaggccgggcatggtggctcactactgtaatcccagtctttgggaggctgaggcaggtagatcacctgaggtcaggagtttgaggccagcctgaccaacatgaagaaaccctgtctctactaaaaatacaaaattagctgggcatggtggcgcatgcttgtaatcacagctactcagcaggctgaggcaggagaatcgcttgaactcagaaggtggaggttgcagtgagccgagatcatgccattgtactgcagcctgggcaacaagagcaaaactccgtctaccaaaaaaaaaaaaattagctgggcgtggttgcaggcacctgtaatctcagctactagggaggctgaagcgggagaatcgcttgaacccaggaggcagagattgcagtgagccaagatcatgccattgcactccagcctgggcgacagagggagacttcgtccaaaaaaaaagaaaaaaaaattagccaggagtggtggcacatgcctgtagtcccagctacttgggaggctgaggcatgagaattacttgaacccttgaggcagaggttctggtgagcagagattgcaccactgcacccctggctgggagacacagcaagtcacacacgcgcgcgcgcgcgcacacacacacacacacacacacacacacacacacacacacacagaaaaaagaaaaagaaaaaaagagttgtctgcgaagaaaaattagaaaatggaattctagttaagcaaatccttaactagagaaaacacatgaaagtctgttcatctcccagggaaataactgcttggtttagtcataatatttgacaactattgtttgtctttgcagagttcagcacatcttggggaatctttgtatgcagcttgttttgggtattcccttggaaatggtccacaaaggcctccgtgtggggctggtgtacctggcaggagtgattgcaggtcagtgttctgaggtaacacagaatcaatacctctgggctcttaggattaaaagcaaatgaaatacacacttatagtaggcttctttaagtcaaggtttactgcactcctaatatgtgctcgggaacacattaagccttagagatcattgaattagagatactatcagcaagcaaagacaagtcattgtgcctgtcctcaggtatctcacactcaagacagggttttgcataattgaaattgcaagtatgcctggcgctcctgcctgtaatcccagcactttgggaggctgatgtgggtagatcacacgaggccaggagttcgagaccagcctggccaatatggtgaaaccctctctccaccaaaaatacaaaaattagctgggggtggtggctcacccctataatcccagctactcagggggctgaggcaccagaatcacttgaacctagggggcggagattgcagtgagccaagattgtgccactgcactccacactctagcctgggcaacagagcgagactctgtctcaaacaaacaaacaaacaaaaaaaaaaaaaaaaaaaagaaaaggaataaagaaaactgcaagtagtttggtgtacaggtacgtatttgagtaaaggtctaaagccagatcatggaggcccttatatgtcagactactgattttgagaagtaacatgatcagatttgcatttaagaaagacaactttaagagaatgtagagaataaccaaaggggctctaagactgggtaggtaaaagtagcatacgtcagtgatccctaaatctgggtgtgcctaagatgatccattatggcatgggaagaaaatattagaactcccatccatccatttgtttatttattggaaacatttttttaaaaaattaaacttttaattttgcgataattgtagatttacatgcagttgttagaaataatgcctagaggtcttatgtaccctttaaaccagcgatccccaatggtgacatcttgcaaaacattagtactgtatcacaactaggatatccacgttgatatagtcagggtacaaaacattttcaaaccatatggatcccttatgatgcctttttatagctataccatcttctgtcccaccctcctttacctctggcaaccactaacctgttctccatttctataattttgtcatttgaagaatattatataaatggaataatccggtatatacccttgtgggattgattttcttcactcagcataattctccggggattcatctaggttgttgcatgtgtcaatagtttattcctttttattgcccagtattcattccataaaatggatatagcactgcttgtttaaccattcactcattgaaggttatctgagttgtttcagtttttggctattaggaataacactactccaaacacttgtgtatatgtttttatgaatataagtatggggttttgtgaacagagttttcagttttctaggataaatgtccaaaggcacagttgttggaacatatgatagtggcatattttattttttaatttaatttaatttaattcattaatttatttattttgagatggagtcttgccctgtcgtccaggctggagtgcaatggtgcgatcttggctcactgcaacctccgtttcccaggttcaaatgattctcccgcctcagcctcctgagtagctgggattacaggtgtctgccaccacacccagctaatttttgtatttttagtagagatggggtttcaccatgttggccaggctggtctcgaactcctgaccttgtgatccacacaccttggcctcccaaaatgctgagattacaggtgaatttttaaagaaaattctttaaatattaaacatttaaagaatgttttctagaatgcctctcccattttacattcaccgtagcaatgcataaatgattcagattcagcatttggtgttgtcatgattttttattttacctgtgctcgtgatacggaagggtggaagggaagtgctgggtagaggagggcatagtgcctggctagggctccacccccaggcctgtgcccacggaactaggtgaggacggacatttttgttttcctgcccaaatgttgcattttccaataccaccctgacttgccacgcccccatcctgtgcctataaaaaccccgagaccctagcctgcagacacacaagcagcaggatgtcgagaggaacacatcgacagaagatgacaggacagacgccagcacgccagcaggccactgaccagccggaggacgcggagtttggctggggcagtcagaggagatcccgggctgccgagtggcctgactccaggggaaaaccatccgccttctggctaccccatctgctgagagctacttccactcaataaaaccttgcactcattctccaagcccacgtgttatccatccaattcttcctgtacatcaggcaagaatcctgggattacagaaagctctctgacctggagataaggcacaagtataattgagctgactaacagaagccacctacagactactaaactaagagtaccctgtaacacatgcccactggggcttcagctgtaaattcacccctagatcactgccgtggggtcagaaccccacagcctgcccgtctgaatactcccccagaggtttgagcagcagggcactgaagaagcgaacaacacccccatcgcacgccctgcgagggggacaagggaacttttcccatttcactcctaagtgggtagtgatatatgatcatggttttttttttttttttttttttttggagacggagtttcactcttgttgcccaggttggagtgcaatggtgcagtctcagctcacagcaacctccacctcctgggttcaagtgattctcctgcctcagcctcccgagtagctgggattacaggtgggcaccaccacacccggctaattttgtatttttagtagagacagggtttctccatgttggtcaggctggtctcaaactcctaacctcagatgatccacctgcctcggcctcccaaagtgctgggattacaggcatgagccactgcacccagctgatcatgatcttaatttgcatttccctaatggctaatgatgttgaatatctttttttttttttttttttcaaatttggaggaacattctgagatgcattgttgaatatctttttatgtgcttatctgtcatctatcttctttagtgaaatgtctctttatgttttttgcccattttctaactttttttaactgttgaattttgagggttctttatatattctagatgctagcccttagctgaatatgtagtttataaatattttcacccagtctgtagcttgtctttttatcctcttaccaaggtctttcagagaacatgaattttaaattttgatgaagtctaacatcaatttttccatttatgaatggtacttttggggttatgtcttaaaaacctttcactgaaccttaggtcctgaggattttttccaatgttatcttctaaaaattatagctttatgctttacatttatttgtttgttcacttttagagacagggtctcacttggttgcctaggctggaatgcagtggcacaatcatagcttactgcagcctgcagcctcgaactcctgtgctcaagtgatcctccggccttgggctcctaaaatgttgggattacaggcatgagccactgcaccaggccttatgctttactttttttctttaattttatgtatttatttattttgagacagagttgcgcttttgtcgcccaggctgaagtgcgatggcgcgatctcggctcactgcaacctccacctcccaggttcaagcaattctccagcctcagcctcctgagtagctgggattacaggcgcccaccaccatgcctggctaatttttgtatttttattagagatggggtttcgccatgttggccaggctggtctcgaactcctgacctcaggtgatctgcctgcctcggcctcccaaagtgctgggattacaggcatgagccactgcacctggcctttacttttaaatatgcaacccattttgagtttgaggtttgttttgtttgtttggcctgaagatatccaattatgctagaataattcgttgaaaggaatttttcctcctttgttgaattgcttttacaccattataaaaaatcagttgcctatagttttgtgggggctattctgggttctttttattctatcaatctctatgtctatccctccaccaaaactacataggcttgattactgtagctatataataagttttgaaatcagaatgattcctcccattttattcttcattttgaaaattgtagctgttttaattcctttgcctttccatataagcgttagaataattctgtttatagctatagaaattcttgctggaattttgataggagttgccttaaatctgtacatcaatttggggagaactgatatattttctatattgagtgtttcaatgtatgaacagtgtcttttatttatatctcctaaatggtgttgtattttaaatttcagtgtccataatttcattgctagtatatagaaacacaattgatttgtgcatgttattcttttttttttttgagatggagtgtcgctctgtcgcccaggctggagtgcagtggtgcgatctccgctcactgcaagctccacctcccaggttcatgccattctcctgcctcagcctcccgagtagctgggactacaggtgcccaccaccacacccagctaattttttgtatttttagtaggggcagggtttcaccgtgttagccaggatggtctcgatctcctgacctcatgatctgcccgccttggcctcccgaagtgctgggattacagggatgagccactgcgcccggcctgtgcatgttattcttataccttgcaaccttgctgaactcacttagtagtagggtttttgttttgttttagattccttgggatttttcatgtcatctgcaaatcatcatgtcatctataaataaggatattttatttcttcctttccaatctatatgccttttgtttctttttcttgccttattgtgttggctagcacttcaagcactatgttgattaagagttaagagaaaagatgttcttgccttgtttccaatcttaggcagaaagcaatgagtatttcgccacaaaatgtaatgttagctgtaagtttttttttttttttttgagttggagtcttgcactgttgcccaagctggagtgcaatggcacgatcttggctcactgcaacctctgcctcccaggttcaagcgattctcctgcctcagcctcccaagtagctgggattacaggtgctcaccaccatgcccagctaattttttgtatttttagtagagatggggtttcattatgttggccaggcttgtctcaaactcctgacctcatgatctgcctgccttggcctcccaaagtgctgggattagaggtgtgagcaactatgcctggcctgagccactgcgcctggccttttttttttttttttcttgagacagagtctctgtcacccaggctggagtgaagtagcatgatcttggctcactgcaacctccacctcccaggttcaagcaattcttgtgtctcagcctcaaagtagttgggattacaggcatgcagtaccacacccagctaattttttttttttttcctgtagagacagggtttcaacatgttggccaggctgatttcaaactcctggcctcaagtaattcatttgcctcagcctcccaaagtgctgggattacaggcatgagccaccatgcccagccaactgtaagttttttgtaggtgctctttaccaatccatttattctaaaaaatgaacaagaaatctatcgagcagagtcctgtggatggcaaaaagaaaaataaggctgggcacaatggctcatgcctataatcccagcactatgggaggccaaggcaggaggattgcctgagttcagtagtttgagaccagcctgggcaatataatgaaactctgtctctaccaaaagaaaattaggccaggcatggtggctcatgcttgtaatgccaggctggtctcgaactcctgatctcaggtgatccacctgccttggcctcccaaagtgctgagattacaggcgtgagccaccgtgcctggccttattctcttaatatcttttggagaggagacgttataaatattaaatctataatttttatttttatttttattttttttgagacggagtctcgctctgttgcccaggctggagtgcagtggcgcgatctcggctcactgcaagctccgcctcctgggttcacgccattctcctgcctcagcctcccgagtagctgggactacaggcgcccgctaccacgcccggctaattttttgtatttttagtagagacggggtttcaccgtgttagccaggatggtctcgatatcctgacctcgtgatccgcccgcctcggcctcccaaagtgctgggattacaggcgtgagccaccgcgcccggccaatttttatttttaaaaatgttttactatatatatagtacacatattatatatatatataaatatatatgtatttttttatttctgtagagacagtgttttgccatattacctagactagtctcaaactcctgagctcaagtgatcgtctgcactggcctcccaaaatgctaggattacaggtgtgtgccatgatgcctggccttttatacattttcaaactttaggaattgtggcttttagtgtcatatcaaataattttttttttcttttttttttgagacggagtctcattctgtcacccagactggagtgcagtggcgcaatctcggctcactgcaaattccgcctccgggttcacgcaattctcctgcctcagcctactgagtagctgagattacaggcgcacaccaccacacctggctaatttttttttgtatttttagtagagacggggtttcactacgttggccagactggtctcaaactcctgaccttgtgatccacctgcctcggcctcccaaagcgctgggattacaggcgtgagccactgcgcccagcctgtataaaataatttttacctaacacaaaatcaccaagatttctcctagaatcaccatgttttctcctagaagttttattattttaggctttccatttaggtgtatcatctggtatttttgcaaggggaaggactgaagtgtcatttttttgcatatggatgtctgttctaacatcatttgttgaaaagacagtcctttctccattgaattgctttagtatctgttgaaaatacaaattgcttttgtatctttgttgaagttgttgtttgtatatatgagtgtgttaatttctggaggttctattctgttccacttatgtatttgtatatctttacaccaataccacatatcttggttactgtagttttcatgacttttggtcatgaaatcaggaagggctagcactccaactttattctttttcacaaattttttggctattctaaatcctttgtatttccatataacttggtttgtgcgtttctaaaaaaaaatctgctgggatttggattgcattgaatctatagatcaacttggggaaaacggacattttaacaatattgagtcttccaacccatgttgaacaaggtatacctttctgtgtatttaggtctttcaaaattcctctcagcatgttttttagttttcagtgtttatgtcttgcagagtttttggtcagatttatctctatgtatttcatatttttgatgtattagaaagggtaatgtttttaaaatttctatttctcggccgggggtggtagctcatgcctgtaatcccagcactttgggaggctgaggcaggtggatcgcctgaggtcaggagctcgagaccagcctgggcaacatagtgaaaccccgtctctactaaaaatacaaaaattagctgggtgtggtggtgggcgcctgtaatcccagctacttgggaggctgaggtagaagaaaggcttgaacccaggaggtggaggttgcagtgagccaagatcgcgccattgcactccagcctgggcaacaagagcaaaactctgtctcaaaaaaaaaaaattatatttctcattcttcattgttacagcatgaaaatatatactttttggtatattttgtatatagatcttgtgttttccaaccttgctaaactcacttattacttctagaagctttttgtagattccattagattttctacatagattattatgttgtctgtacttgctaatttcccttttgatgttttctttgacacatgggttatttaaaatgtgttatttagtttttaaatatttgtgtgtttttccaaagatgttctgttgttaatatctagtttaactgtggttaggggctgggcgtggtggctcacgcctgtaatcccagcactttgggaggttgaggtgggcagatcattgagcccaggagtttgagaccagcctgggcaacatggttaaaccccatctttaaaaaaaaataacaaaggctgggtgtggtggcttatgcctgtaatcccagcacttggggaggccgaggtgggcggatcatcaggtcaggagttcgagaccagcccgaccaacatggtgaaaccccgtctctattaaaaatacaaaaaaattagctgggcatggtggtgtgcacctgtaatccaagctactcaggaggctaaggcaggagaatcgcttaaacctgggaagcagaggttacagtgacctgagattgcgccactgtactccagcctgggtgacaaagcgagactccatctcaaaaaaaaaaaaataataaaaaaaataaaaaaataaaatgaaataaagtaaaacaaaacaaaaacaaaaattagcttggtggtgcacacctgtagtcccagctattcgggaggctgaggtagaaaaatcacctgagcctaggaagtcgaggctgcagtgagctgtgatcatgccactgcgttccagcctgggcgacagagtgagactctgtctcaaaaaaaaaaaaaaaaaaaaaagaaaaagaaaaaagaagaaaacaaaactgtggttagagaacaaactttgtatgacttgaatccttttaaatgtattaagatttgttttatggtccagaatatggcctatgttggtaagtgttctttgtacatttgaaaataatgtgtgagatcagttgttgttgggtagaatattgtatacatgtcaattaggtccatttggttgattgtgttgtttgtcttctgattttctgtctactttttctataaattattgagaaaggattattgaaatctctgattataataatgcatttgtttgtttctcctgtggttctatcagtttttgttttatttatttatttatttatttatttattttattttttttgagatggagtctcgctctgtcacccaggctggagtgcagtggtgcaatctcagctcactgcaacctgcaccgggttcaagcaattctcttgcctcagcctctcgagtagctgggactacaggcatgtgccaccatgcccggctaatttttgcatttttagtagagacggggtttcaccatgctggccaggctggtctcagactcctgacctcaggtgatccactggcctcggcctcccaaagtgctgggattataagcgtgagccactggcccatttatttatttatttatttttaaatttttctttcttttgttttctttctctttttttctttccttctttctttctttctttcttttttttttttttgagactgagccttgctctatcacctaggctggagtgcaatggtgcgatcttgggttactgcaacctctgcctcctgggttcaagcaattctcctgtctcggcctcctgagtagctgggattacaggtgcctgccaccaagcccagctaatttttgtatttttagtagagacagggtttcgccactttggccaggttgtcttgaactcctgacctcaggagatctgcctgccttgtcctcccaaagtgctgggattacaggtgtgagccactgcagccgaccatatgcctgataatttttgattggatgctacacattttatctagttggatggtgcatatttttgtgttcctgtaaatacttttttaatttttaaaattttatttatttatttatttatttatttatctatttagagatggagtcttgctctgtcacccagattggagtgcagtgatgtgatcttggctcactgtagcctctgcctcctgggttcaagcggtgctcctgcctgagcctcccaagtagctgggactacagacgtgtgccaccacgcctggttaatttttgtatttttagtagagacagggttttgctatgttggtcaggctggtcttgaactcctgacctcaagtgatcctcctgccttggcctcccaaagtgctgggattacaggcatgagccactttgcccggccaatgctttttattttttatttttatttacttattttttttgagacagagtctcactctgtcatccaggctggagtgcggtggcatgatcttggctcactgcaacctccgtctcccaggttcaagtgactcttttttttctttttttagacagagtctaactcttgtcgcccaggctggagtgcagtggtggatcttggctcactgcaacctctgcctctcaggctcaagcgattctcctgcctcagtctcccaagtaactgggattataggcatgcaccaccatgcctggctaatttttgtgtttttagtggagatggggtttcgccatgttggccaggctggtctcaaacttccgaccttaatgatccacctgccttgtcgtcccaaagtgctgggattataggcatgagccactgcactcggcccagggggttcttgtgtctcagcctcccgagtagctgggattataggtgcacaccaccatacccggctaatttttgtatttttagtagagaaggggcttcaccatgttggccaggctgcttttgaactcctgacctcaagtgatctacctgccttggccttccaaagtgctgagattacaggcctgaaccactgctccaggccataaatactttttagatttgttctgtaactcagttatgttacttgaaagcagtttgattctttttggtaagatggtaattattcccaccactggacccttttgtgtactctgagcattgccccattaattatggcattttccagtacacatccccacactgcttgcaggaaaggacctagagaaaagtcgcagggcagaaaagcagaggaggacggccctggatttggcttatcagtccttggggccctcctgccccaggaagggcagcgaggaccatggtgttgctgccatcattatcaccctggccatgagattgcaggactggggcagacccagaggaggactggaagggccagagtcagccaggaacacagcagctcagctctcggctgttggcaggtggccttgatggcttttcaaaggcaatcactccacccaggacaaagctcacttttctctggggcaaaacacattggttcatttgttcagttcattaattcaaccagtctgtttctaagggaaacctggctgtggccagtcctgctcccacatccctaggtgcccagtgttcccaagggacctgaattccaaccccagttaggagttcaggggtcagcatccccatgccccacatgcctgttagggaggacagtgaaggctgagcactcttgggctcaccaaacaccagcattgagaaactgccccccatcttccctaggtaaggtgaccttgtaggacagttcatgctattgggatggtctgggtaaggtggccacgagggcaggggaccaaggtctgccccacctttgaccttagcgacatgcccctgattgcctggcccccctctggttgtcgtctgagtcccttctctgggggtacctgggccttgctgcacttcctttgtatgctaacttcatcctgatcaaacttgattttcctactgtgatttctttccaatttcttcatcaagttaaaaattctgtattgagagcagtttcctacattacctcaaatcctgttcaaacaaggattatccctagaagtcagaaaggagggaaaacaagcttagtcacagaagactactctatacttgagcttctgtttcaagggaagtgagtaactggtggtggagccctgcccctctgcagtgtgtggttttgtcctgatatattttaagattgagatgtaactcacctgtcataaaatgcccagacttatgatgtgtggaaacaaaagagttttccagtacagaaagttacttagcctctctggtgctgtgtaagcaacaggtagtcttcccacttcatttttggtggttctttccttggcttgggtaatttccttgcatgctcctttctggagttttctgtatgcagctttctgctctctggtaccctgtcttgtaaactctagcagtccagatctatctggactctaaacttcatctcatcaacttaaagtttgctgagatctgcctgggttcctgcttcatgcgctgtattctgtaatctccctcaaggtagtacctgggcaatcagataactcatctattaataactgattccctgtctctaagggtttactggttttgttttctgatgtctagtatcttgaagaccattctttcctatatgttgtccagtgcttttggctttttcaagtgagacagcaaatcctattcttgtgaccttatcatggtcagaagtagacatttgtatctattttaaaaataaatttctcatatgattatgatataatcaccccagccctagtctataggttagcatttgagaatcattgctctaagttgctctggactacttctttgttttttgagacagagtctcattctgtcaccaggctggagtgcagtggtgcgatctcagctccctgcaacctctgcctcccaggttcaagtgatcctcgtgcctcagactccccagtagttggaattataggcatgtgccaccacagccagctaattttattttttttcaatttttttgagacagagtctcactcttgttgcccaggctggggtgcagtggcgccatctcagctcactgcaacctccacctccagggttcaagctattctcctgcctcagcctcccaaatagctgggattacaggtgtctgccaccatgcccggctaatttttgtatttttagtggagatggggtttcgccatgttgcccaggctggtctcgaactcctgagctcagctgatccacctgccatggcctcccaaagtgctgggattacaggcgtgagccaccgtgcccggcctactggactacttctcactgatcttcagtcatccatatacctgtttgtatgccattgcttttccagttctctaagtcctgaataccttcttctcttttgtttttcttatccaatccttttgtgtgtgggggtgaggggagaggtcttcctctgtcacccagactggagcgcagtggcacgatgatagctcactgcagcctcaaactcctgggctcaagtgatcctattggctcagcctcttgagtagcaaggaccacaggcgggtaccaccatgcttggctaatatttttcttatatttttggagacggatatcactctgtggcccgggttggtctcagactcctgactttctggcctcaagcaatctcctgcctgggactcccaaagcactgagattataggagtgaaccacagtgtctggccaatcttaaagattcttcaaagtttaggccgggcgcaatggctcacgcctgtaatcccagcactttgggaggccgaggtgggcagatcacgaggtcaggagatcgagaccatcctggctaacatggtgaaaccccgtctctactaaaaacacaaaaaattagccaggcgtggtggcgggcgcctgtagtcccagctgctcgggaggctgaggcaggagaatagcatgaacctgggaggcagagcttgcagtgagctgagatcacgccactgcactccagcctgggcgacagagtgggactccatctcaaaaaaaaaaaaaaagattcttcaaagtttaatgaaaatgctatctcctcctcctcagagtagcaaggactccacccttctgctgagaaaatcactccttcctaagtgcttctacaataaatttatttttgtcatagtagttgttatattctgtactttataatagttgtttgctcatctctttgtaaaattactgaggacagacactttttcttgcacaaaataggtactgtattgttttgtatcatacactaaggaaatgaaagaagaccttgaaaggaatagaccaagtaatagaactaagcagtatagagagaatattttagtctttgcataaggtggtttgcaaagccttgttttggtccagtaaatctaggattaggttagcaattaggattcatcttgcttggggaatctgattggatcgtatgttgagaaggattctgagggcacattatggctcattgagaaagatagctattagataataaaatgttggattgtctcaggtattttgactgaacataggatattttgcaataatattaggttgatgcaaaaataattgcagtttttgcccttaaaagtaatggcaaaaccgcaattacttttgcaccaacctaatagctaacaaatatataatacacatcaagcagtattctaagcacaaaacacacatcaactcattatttaccctgacaatccattaaggtaagttctattaatagccccattttgcaggtagggaaactgagacatagagaagtcaactaacttcctcaagtcacactgctggtaattctggctccagacgattctgccattgtcactgctatgttgctgttctaatgaacattccatgttttcagaaacactgtggtagttagcatatacagctatgcttctatggtatgaaaggggcaaaatagatttgttgcttgctaatgtgataatagaccagacttcccaaatgtctaccttagattagaaagatttatctttcctgatccgtatagtcatgtctgatcctttgtgttttatttctttagggtcccttgccagctccatctttgacccactcagatatcttgtgggagcttcaggaggagtctatgctctgatgggaggctattttatgaatgttctggtggtaagaaccatggggatggagtccacgagtctcttaaaaaaacagaaaacagtaactcttctttgtttcaacgaaccttcatttatcaatatttactgagcactcaattttctgagaattgtatggcaatgccattttgtttcctttcttttctttctttttttttgagacagagtcttgcaccattgcccaggctggaatgcagtggtgtgataatggctcactgcacttctgcctcctgggctcaagcaatcctcccacctcagcctcctaaatagctgggactacaggtgtgggccaccatgcctgactaatgtttttattgtttgtagagccagggtttcgccatgttgcccaggctggtctcgaactcctaggctcaagcgatctgcccacgttggcctcccaaagtgctgggattacaggcgtgagctgccgcacctagcttcctttcatatgttatcattttttttctcatttcaaaagtaatgagtacaacataaaattttaaataaaaaagtagaaagttaaggtcctcaatatagtatctgttaacagttgggtgggtggtgaaagacgttgttaacagttttatatatttttttcagccctttttattttattttattttttaaaggaaaccaagtttattaagaaagtaaaggaataaaagaacggctacttcataggcagagcagcccagacctttttctacatgtattcaaaatcctaccgatgttaatcttataacaatgacaccacccttatattgttctgcattttatcatagagcatcctgaccatctacccatgtcagtgcttagaaatcctcccagcttagagctgctccctagcatcctctatatagatgcaccatgatttatttaatgaatctctcgctgaaaaaaatttggggtgattcctgcttttcatgtttacaagtaatgctataagaaatgcccttggccgggtgcggtggctcacgcctgtaatcccaacactgtgggaggccaaggtgagtggatcatgaggtcaagagatcgagaccatccaggccaatatggtgaaaccccgtctctactaaaaatacaaaaattagctgggtgtggtggtgtgtgcctgtagtcccagctactcgagagactgaggcagaagaatggcttgaacctggaaggcggaggttgcagtgagctgagatcatgccactgcactccagcctggcaacaaagcaagactctgtctcaaaaaaaaaaaaaaaaaagaaaaaaaaagaaaaaaaagaaaagaaatgctttttacatttatctttttgcatttgtgtaaattttttttgtaggataaatttctaggccaggcatggtggctcatgcctgtaatcccagcactttgggaggctgaggtgggcggatcacaaggtcaagagatcgggaccatcctggccaacgtggtgaaaccccgtctctactaaaaatacaaaaattagctgggtgtggtggcacgcacctgtagtcccagctactctggaggctgaggcaggagaatcgcttgaacccgggaggtggaggttgcagtgagccaaaattgtgccactgcactccagcctggcgacagagtgagactccaactcaaacaacaacaacaacaacaacaacaaaattctaggtagaaaagtgtaaagcaattataaaactgttccaaatatagaaatcactaagaaaagtggttttttcaactttggattgcaacccattagtggttgtagactcactttaaggaactgtggccaaaagttaaacccaagaaaaaaaaagtcagtgttattgtttgatttatgcgtgtactgggttgttatgtaaattatttcttactgtaggtcatggtcacaagagtttgaaaataattgatttagagtaaacatgcctatttcagcatctttactccttgggaagagagttactaatttgaaagtgaagggacaagtaattcaataaattatattagaaatgtctcgctcagcagttcgccactgacgcataagggacccaaagctaaaatccaacaatgagccaggtgtactggaatgcacctgtagtcccagctactcaggagtctgagacaggaggaaggcttgagtccaggagttcgaggctgcagtgagctatagattgcaccactgcactccaacttgggtgacagagtgagatcctccctgtcttctacctcccctcacagaacccccccaagagcgcccccaaaagaccctgcaataatttttgacgaatattttcaatgtttttgaaattacctcaaaaattaaggtaatactcaaatctcagttaagtctttgctaaatactactgggaaagaggatgaagaaacatcaaatgaatattaaccaaaaatcttatgaatatttcatcaatcttagtttaacagcatttatttatctatttatttattgacatgttaagtgctgattttatattacttttattgagattgtttctggctagcaaaattgtgtcatttatattattaaattaaatgtcttgtcattttattctccaaagtgcattgtacttcccaaatacatttaaaaactcggctgtgacactcatgctttgttttgcaaatatttgatactggaagattatttcaaatgaagagcagatgaagagggagtagagttgaggtttcatttgtccatagatagcttatataattattatttatctctttttaagaattttcaagaaatgattcctgcctttggaattttcagactgctgatcatcatcctgataagtaagtgtgttttgtgaatacttcatactgtccaagtgaaaataaaatatagagacaaatctctaaacattttatttgggaatcacaggattgcaatttggggcatacacacagacctgggaggtctatggtatgtctgaagtacaaaagaaaaggctgggggttttattagaaagataaattttacatattattttgaaagaaagctcattggcactagagcagcctttgggagctggttggtgagtgatggtagtggggagaactagtcttagacttgtgttgtttagacctgattcttagactcaatttgtttcagcagctattaggtaaaactagtcttatggttagaacaggtagtttcggcagctgggcttgtggagaattcaattgttggagcagtgctatgtgctctgagtgcttttgtcccctggcccctcaactctgatttagctgggtttgacaacaatgacctatttcacataatcatctcacataatattttcaccatgtgattggtttaggcttcagaaggcctttccacatttcccagacactaacatggagaataactgcaagcctacagttagagaaaaattgtccacttcacagcactaagcagaaagaagtaaacgaaggagttttacaggctctcatgggtggttcttagacatgcctacgtgatgtattttggcttttagtatctttatggagtgggggaagccaagagaatagagccctaggcaccccctctacttgaaccacaatagcttcacttatattttatatactggactttttcatatattggaagctgtatgtgattttgtctgcagagggaaaacttggaaaccactgatataatctcttttcttcctcaatttctaaattttcagattaaaaaaaaaactgatccagtaagtattgagtgatagctgatagttgaggattaatgatagagagttgggggagcggggggcaggtggcagcgggcaaccgttcaagaagcccagaccaagagggtgactaatgtggcttttgaaatctccaagcattctagaatcacatgctaaaggaggttaggaagaatgctgtctggagaggggatggaagtgcagctgagtctgagagtaaaggtagattccagatgacagcaggccatagagcatggaagaaaacaagagcaaaggtgggggtggtaactggtgttgacagacctgctccagttgaagttctctccacctggagggctgtggaagaatgacagaccctggggtcagacctgaaagccaaggcagaggttatacctgataaagcctaagatgtttttggctgtccacatagtaagaaaacaggattttgcaatttctatgaagggttcgattatccccattacaggaacagaggcaactatgtctgtgggaagggactctttagtttattgaccatttaaatataagaacgctaatatttcactctgagataaaataattcacttgtttatagtttatactattcttaacttttttcttcataacaaattcaaaacctaagagaagggagagtgagtatctgggaggcagcagagctgctgcaggagctgagctgcctcctcagttgttcagggtcacacccagaatcagaggacacattgtttgggcacagaattgttgtcacctgagatacggggtcttcagtcagtctgcttcatttctaaaagttctttggcctggtttacctactattgaaaatgggaagagttacaacacataccagattaataaaatataagtgcatctgtatttgaaatgtgtttctttggaaatgtatataattttgtaatatgtaatatgtaatgtgtataaagttgtaaatattcttctttttttttttttttttttttgagacggagtctcgctctgttgcccaggctggagtgtagtggtgtgatcttggcttactgcaacctccgcctcctgggttcaagcaattctcctgtctcagcctctcctgtcaacaggtgcatgccaccatgcctggctaattattgtatttttagtagagatggggttttaccatattggtcaggctggtctcgaactcctgacctcaggtgatccactcacctcagcctcccaaagtgatgagattacagccgtgagccactgagcccagccaagttgtaaatattcttcttaattgtaaatggcaattgccctaaaaaacattccttcatcaagcattatgtttgagaccatcctgtgaaacatagggagactctgtctctacaaaaaaattggtcaggtgttgcggtgtgggcctgtggttccagctactcaggaggctgaggtgggagaattcgcttgagcctgggaggtcaaggctgcagtgagccgtgaacatgccactgtagtctagcctgggcagcagagcgaggttgtctcaaaaaaaaaaaaatccatatgaaggcaactcttttaaagtaaatgttaaatttttaaggaggacaatggtttggcttcttggaataagggcttattttcaggtgggaagacacatctcagtttagaggctgcagcaacccagaagaaaagtcccctaggaagcagaaagaggaaagaaccagactcagatataggaaggggcaagatgagagaaactggttggagaaattgacatactaatggttacaaagactttctgagaggaggtctcctattgtggaagactaagccaaagtaactgtttccagttatgtggcagtgttttttaaaaacactttcctagacccatgggcatgttatttatgtggaccaggaaatgcaaatgatgattgaaaatatgggccaggcacggtagctcacgcctgtaatcgcagcactttaggaagccgaggcgggtggatcacgaggtcaggagatctcatggtgaaaccccgtctctactaaaaatacaaaaattaaccaggcatggtggcatgggcctgtagttccagctgctcaggaggctgaggcaggagaatggcgtgaacccaggaggtggaggttgcagtgagctgagattgcaccactgcactccagcctaggcgacagagtgagactgcgtcttgaaaaaaaaaaaaaaagaaaatattatatagcctcatgaatctagcactttgtgtaatagtcatttacaactaaatgaatattgaatatttcctcgacctcaatttctgtccagtgacttcaacatcaatcaatacagtattgaaagggaatctagtcagagcacatgtcctgatgctattttcccaaaggcaaggactaggtcttttcatctcctaggacacagtggctcactaagtagagcatagggaattaggggatgggtgtggaatgtgatagctgcaagagatgtttccaagcactacacatatagggcagagttcttctaggccaagaagtcggaagctccttttgcagtgcagatccgacttacttgacgactgcctaacttctggctctcacagttttattggagaatatggaatgatttcctttcatggcctgacaccttcagaactcccgatggtaattacaggcaattagtgtggtggctgagagtggagtcttggtgtcttggtttctttatgtataaaatgccaccatccttcttcacttcgattgctacaatagtatttttccagctggtcttccagttcctgttcttgctcccttatagtctacttcctatatggcagctagaataatctttgtaaaaccatcagtgtggttgctcaagcctgtaatcccagcactttgggaggtcgaggtgggtggatcacctgaggtcaggagttcgagagttggagaccagccttgtcaacacggtgaaatgctgtctctactaaaaatacaaaaattaaccgggcatagtggcacatgtctgtaatcccagctaatcaggaggctgaggcacgagaattgcttgaacctgggaggcggaggttgcagtgagccgagattgcactactgcattccagcctgggcgacagagttgagactctgtcataaacaaacaaacaaaatctatcatgtcactcctgtgctcaagagctttcaaagacttcctatcactcagtaaaggttgaagtccttacaatggcccatatagaccctacataatctgtcccctgctacctgtctgacctcatcacccacaaccttatccctaactctagtccagaatcacctggaggtcttgttaaaacaaagttgttggaaacaactttaccacagttggtagttggaaaacacagccatggaagtaggaatctactaaggagagtacaactcaccttctgaaaacaaaaacaaaaacaaaaacagaaagctgagtcccacccttaagttttctggttcagtaggtctggggtgggtttaagagttttcatatctagtaagtttccaggtgaagctgatgctgctggtcttggtaaaaaccactttgaaaactactgatccagccagctcaactgctttggtatttttcaaacacaccaggcacattcctgcttagggactttgtacttggtcttccctctctctgaaacactcttatgtcaaatagcagcatgacttggacccttacctctgtccagcgtcatattctcaaagagatcctccttgacacccctattggaaatcacactcgacaactggcattcctatttcttcttctctttgtattttctccatagcacttagcactatttgacatactgtatgttttacttatttgtttgcctccctaccaatcacccccccacataccccccaacagtttgtcagctccatgagtcagggctgttagatctgtccattgctgcctatctaccagctagaataatgcctgacacatagaggacaatgaatgcttgttggatgaataaatctgtaaaatgggataatgatagttcctacttcacagggttgtgatgaagattaatgagttaaaagatctcttagaaaagcacctgtcacagagttaagtatcaataaatgatagctagtattattattattagaggggaaccaaaaacatttggtgtactactgtggagattctgagcctttatcagggtgtttttccttctagttgtgttggacatgggatttgctctctatagaaggttctttgttcctgaagatgggtctccggtgagttcagtttctttcttttataaaatagaaattagtttactgtcaaaaagggttatcaaataggggttacaacgctgtgatttagggcagccaaatttccatttggaagttaagaaaatttttaaggaaatcagacttttgaattgtccttcccacttaactctctcacagccctgatcactggctctacttcactgcacctgccatattggtagctattccaaaacaggagagaatggccaggcgtggtggctcatgcctgtaatcccagcactttgggaagccaagatcggcggatcacagggtcaggagtttgagaccagcctggccaatatgatgaaaccccgtctctactaaaaatacaaaaattagctgggcgtggtggcagtcacctgtaatcccagctactcgggaagctgaggcaggagaatcgcttgaatctgggaggcggaggttgcagtgagccgagatcgcaccactgcactccagcctgggtgacagagtgactctgtctcaaaaaaacaaaaaacaggagagaatggattttcctgtccacatagaataaaaagcagttggtttagccaggcatggtggcatgtgcctgtagtcccagctacttggggagctgagatgggaggattgcttgagtcctagaggttgagtctacagtgagctgtgatcatgcgactgcactccagcctgggcgacagagttgagaccccatttcaaaaaacaaaacaaaacaaaaaaacagattggaaaacagcaatgaaagattgagttctataagttgacaataaagaaaattgacaaaattttccagttttgctgtgatttgtctttgaatttggtagtttctgtttgggtatttcttgtgtatgttattacttgtgttttaaatctgaaaccccatgtatgtggaatcagattatgctgctatagagatccctcatggcaactcaaccattctcttagttggcattatatagaattattttaaatgcaatgatgattaagaatgagaaacaatttctctgtcttttgtactctaagaatgggtgaaaatgacatttttaagctttgtatctttcagagtatctccttctctctgtgcacatggagttttgtgtctcttttgccttacccctagttctctagacctttaagactcttgtttaactgtgacggtatttgtgtttgaataagagagatgcaactgaaatacacaattagcattgtcttcacttatttccattttccctccttttctcccaaggtgtcttttgcagctcacattgcaggtggatttgctggaatgtccattggctacacggtgtttagctgctttgataaagcactgctgaaagatccaaggttttggatagcaattgctgcatatttagcttgtgtcttatttgctgtgtttttcaacattttcctatctccagcaaactgacctgcccctattgtaagtcaattaataaaaagagccatctggaggaaataaaaaaaaaaggaagactctatgaagaaacagagaagtctcagaaaaggctaacaattttatatagaggacaaaacagcattaaactcatcagttgcaaagattgcctataaaaggaccttaggatttaaggaaggggcttcttaatgtagaaagggaagaagaagagagaaaagaagggtagtaaaaactagagattggggccaggcgcagtggctcacgcctgtaatcccagcactttgggaggctgaggcgggtgaaatcacctgaggtcatgagttcaagaccagcctgaccaatatggtgaaaccctgtctctactaaagaaaatacaaaaattagccgggcgtggtggcgtgtgcctgtagtcccagctacttgcgaggctgaggcaggagaattgcttgaacctgggaggcgaaggttgcagtgagccgagattgcgccactgcactccagcctgggtgacagagcgacactcggtctcaaaaaacaaaacaaaacaaaacaaaattagagattgggtctttcccaggcatatggtattctataaaacagacttactctccttggaggatatattttggagaatgcttcataaaatctatgaatactgtacaatgctgataataaaaactttttatacctg

SEQ ID NO: 703 - DNA, 83593 bp, Homo sapiens
aaagtggcgagagccacctcggcgcttgggcgctcagtcgcaggaggcgctccttggcggtgcctggagcccgggcgcaccccaccgctcccgggacctgttgggggctggcccgaaccgtcgtcgaagggagccgctcggccacccccgacgttcctcgccccgcccgacgttccctcaagtggccgaaccagccggacgagccaaactcgccgggcctcccggcggcagcaggtggccccgtccttccagggagggccctgcgccccgcggcgctccggagccctctcggccgcccccgccaggcgggatggaggcggatggggacggagaggagctggcccggctgcgctcagtcttcgccgcctgcgacgcgaaccgctcggggcgcctggagcgcgaggagttccgggcactgtgcacggagctgcgggtgcggccggccgacgccgaggcagtattccagcggctggacgccgaccgtgacggcgccatcaccttccaggagttcgcgcgtggcttcctcgggtccctccgcggggggcggcgccgggactggggtcctctggatcccgcgcccgccgtgtctgaggcggggccggagacacacgacagcgaggaggacgaaggcgacgaggacgcggcggcggcgctggccacctcgtgcggcccggcgagtcccggccgggcttggcaggatttccaggcgcgacttggggacgaagccaagttcattcccaggtgcgagtgtgagctgggggcgggaggttattctggcgcttcctgcttgcttcttcccacttacttgcaggtgtgcagacccaatggcccccccccctagtcttctctgtgagttgcttgtcttccttcacctactcgctttgacttttccaagatccgctagagttaagaaaaaggagtcagagagtcagcgtttggggagaaagttttacgtgctgaatcctgagcctgcaaagggcggcgtgttcattacaggagctctcctgaaatctgcagctgctggcgccccgcgcgagtttaggcgcgcgcgccacatctcaccgcgtcctggttacgtcaccttctaccccaggccttaggctctcaccccagggctggggcccgggctgtttgccaatttggcgtcctctgtaatagttttctgatttgtcgttttcctaagactatagaaaaggaaactttgttgggcttttacattgctggacacaaatattgattgatgtacctgctaggcattttacagagttcacgcatttaattttcataacatccctagaaggtaggctagcttatttctgaacttagacctagaaattagacagacgttaagggacttgcccagttaaacagcagagatttgacccaaattttgtgaactgaaaaactcactttttatgtgacggaataaaatgataaaatgacacagtatattctctgctcttactgctctgacagaaataacgtgtcaagtcacggacttaattatcaggaggtaaggggatgcctgcaggtgggatttcagggcctggagggagagaggctcagattttctttttgagtttcgtttgcatttgtccatgccttggtgtggtgggtgtctccagctgctatttttcacttcatgccccagcgatacacacatttcagtgctgttaagtgtttttctgctttatgtttggattttagctgaaattttgctgagctctggctgtcgttattaagacgctctgaaaggcatcattttggttggcagtttgcacatctgagacagaacattgaaaaggaagtatccctggaaggttgtcagtgtgcttgttcattggaagccctcacttccttctcctcccaacttctccctccagcttggaaagtaaggggaatattgggcatggagagtgactcactgccatagaagggttgtgtagagaaagtgggtgtgtaacgatcttttctgttatttacaaatgagttactccccaaccagggaagtagcaaaatttaaacactgctacaacctatactctttatttgagtcatctttcatctgtaacttagtttgggtgcagctagttaaaaaaagtaagaattttaggaatgaggcagggtgagtccacatcatattggatatgatgtatgcatacatgtggatctgtttttcacagttgtctagtctcagcaacaaatatttcacacacaaccttaaatgattgaaatgacctgggtcagtgtacaaaccaggaattaatattattggtggaattattattatcatgttgcctttccaaattcttcagagattactacatttaatgggcaccggtgtcacctggtagacttgtgtcctaagcctcacctcctgatgtgagattaacaagtacaatatttgtcttcctctcatgttcaagtggaagagatctaaactgagttgctgcatcagattgttaccatggcagccatccgctgttttggtaaattggattaattctacttcacttcctcatacagctgttgaccttttcttccttccatccaaatgtgatttaaacacttttttgttattgataatgctgtcggcattatttcagccaaatgtattccataagcattaccaattgcctgccatatgccaaatactggcttaggtactgtcctaggttgctggggacaaagagaaggatagtatgtagttcatgccctcaagatgctcatggtgtggatgaaacatttttccagcaacttcatcgaagaacatttaaaggcaaagaacatttgtaggaaactccctgtattgtggacatagcccaacagacggctgcaagcaagaattttctttgaagtcttgagcttttctttaaaaagtgattaagttgttcatctttgtacacaatattttgggacttgttttcatataaaatagagtttcttctgaagggagaattgtctttctaggaaggtgtgccattccaacttgtggctttgtttcccacctggcactcaatcttatccctggggacagtctgccccagggctatcctggggagtgttcacatccagtttgagaggaacggatattaaataggaaaatgtttggttcctataaaggcaaagcatgacactgttgattttcatttaaagaatctttcaagcaaaatattaagcaattttgggttaaactcgccagtcatcagtaatcgtgatgttagagggaagataatattgcatcatgaagggatgaaagtagcttttgggatatgtgtcattgttgagttcattttctcttagaaaattgagggactttttgttttgaaggctgaggaaggagtgtccaaggagttgtgtgaccgggtaagctgagcctggcagatatgaagggtctgcaaggtcaggatgggccttgaccacttcctggtcagtttgataaggtcagccaacaggtgaaggcagcaggacagtgtgatttagttacataagagaatttgggaggacaggtgctaccaggccaagaaaagtcctggaagtaggaagaaaatgtgtgggtgttgagggtggaggggcagggcagagagccaacttataatgtagccttgccagtttctgatgcctgggtcattgtcttggtgaaagggagtttcatactcaggagatactcagtaaatgtttgccaaatgaatagaataaatcagtattctttgattcttgtttcatatatctgcattttgagagagagtgtagttcatgctgtgagcattttctccacttcttttgcaggttctctcacttttttttttttttttcagttactgttgtgagccagtcttggtgttcaaagattgccaagagaaggaaataggctgtgtgtgtgtgtgtgtgtgtgtgtgtgtgtgtgtattgagcatttgatggatggctgagagcagggatgaaggcctcttctctgacctctagtcagagctgaaacttttcagttttttctcaactcccatttgcagcaattttgagtgttatctgtgaattgattcatgctgataaattaacttagaaaaccccacattctcacaaacaggaatgtgagggtgcagctggcactggaaccactgagggtctgtgagtgggcacaggtatcccaaaagtatccaaaggagggacagcctcaggtcaggtacctgagggtgtggcaggtatagtgatgggtgacctgccaggcagtgctaggctaggatttgttgagacgtcaaaatcagcaccgttagctgtttcacatggtttgcgatgtttctacatgcacgatgtcgaaggggattcttttatttggtaatttaaaaacaaatttaattgagaggaaccaaaactttccatatgtgaattgtatagagattggcaaaacggcttaccttattaaactcaagaggaaaggctcacccattggacagcaatcccatttaattgggaaatttttaaaaacaagtagctgccagtaggcagaggcgaagtttcagtattggtgagggttgcttctccatttccctttcttgggttctagtttagcccttttcagaatgattgccttgttttgtaatagtgtagttgcttcacagctcccttaatttacatgaaacggtgcttgacaagatagaaaagggagaggagagacagaggcaaagaaagacataaatacggccgggcgcggtggctcacgcctgtaatcccagcactttgggaggccgaggcgggcggatcacgaggtcaggagatggagaccatcctggctaacacggtgaaaccccgtctctactaaaaatacaaaaaattagccgggcgtggtagcgggcacctgtagtcccagctactcgggaggctgaggcaggagaatggtgtgaacccgggaggcggagcttgcagtgagccgagatcgcgccactgcactccagcctgggcgacagagcgagactccttctcaaaaaaaaaaaaaaaaaaaaaaaaaaaagacataaatacatcaggagtgagccggagagcaagagagaaggccagagatagagtggcagagggggacatgttgagagggagtgaaacacagagctcagatggaggggaaaggaagagagactgatggattccatcttgcctcagtttctcctctttccacttagtagaaaggtggccctgagtcaccttgagatgagagaggtaaatcagctcttttctctttgatctcagctcttgagtatcttccacatgtgagcatcttggtgctttgggatgtgtttgtggtatttaaagacgaatatatatatatatatatatatatatgtatatatgaatatatgtatatatgaatatgtatatatggatatatatatgtatgtattttttcatgctcatggccagtaatgtctggttctcatccaagaagagaagatgtgttctagctttgcaacatggtggtgggctacacccaagtcctagatgaggttcaagggtgcttttgactgtattgggtatttaccttgagtaccagatttgggatctatcattgtgcttggcataggttttatggaagtttctttaccttttctggattctgaaccgggatcctaacatctgtgtctctgtttatgtctgtatctgtatctccttgttttctaactgttgctattctgtagctttttgctttttctctttaatgtgtcctctgtcacaattatgtgtatcattactctgctgagtgggagaaacctgtctcttgataactacagctcattattggtgtatacaaatgctactgatttttctacattgatttttgtatcctgagaattaactgaattcgtttatcaaagcttaggagtcttttataggagtctttagggttttctagatataagattatattgtcagccaacagagataatttgacttcctgttttccaatttggatgggtttatttctttctcttgcctgattgctctggctaggacttccagtactatattgagaaggagtggtgagagcgggcatccttgccttgctccagattgtagggggaatgaacctttgatccttcctcctgggccttttgtgaatctgtgcatgccttaggttttatgagctctacttgctgggtggtggccacttctggttctgatatttgaatttaatctcaaggtagtaatttctttttggctttcagattttggaaaggtattttggacttctagtccttagaaggctctcagtgttagccatctgagcagtggcctgctgtgaccctcagaattcactgattgctcagagctttgctctcagaatttgaagaaagatgatttattctgtccttctggtttgtgcaaaaagaaaaaggcttaaaaagaaaaagtcttaaaacttagtgttaccagggagactgtactcccagaactacagactcttctctagcttttcctcaaacctgaacttgtgatttattcttctccaaaactactgttaaattcagttacactacccctatctctttaagcgtgtacaaatcttcatctgtttcttattttctgcccaggttatccaatcttttttcatttgtacaatgaaagtagccgtatcatatggggaaaggttagtgtgccatggtgattccaagtgtgttttgaatcctttttctctcctaagagggtatacacagtatgccttcttgcttcatgtatcacttattacaatttaggtagcacttgagtgcagtatgtagtcagaagagggaaatgggaagagaatatttattctgagtgttcagggctgcctcacctgactgtattagtctcatatgaggttgtaaaatggaaagtaaacacttgtctgtctcccagagggaagttctaatggtggaatttatctatgacacataggatttctttagaattattttgtcaaacaaacaagttcattgcttcaacttgtaaatattcagggtcttccaaacgataactgcttttgtcagagtaattataagaagagtgaattttaacccttaaggccttagtctatatgtcttataaaaacaggatatacagctccagtagtgcaaatgtttctttgattctttctctagttcacccaatattgacattgcccttgacatctcactaggcactatatatatacacctgaccctgaccttgtttctcaccttcttaaatactcaggagtttctaacacctgaaggacctgggatgtggaataatgaatgggaaaattcctcctggctcaccaaaacaccactcattctggactatggatgtttcacatcgaatgtttctcaaattgggagccatagacccttcggggtccttacatatatctttgggagttttaggagaccaaatattcttattttcattttggcaataatgtaaaataaattgatgtgagctcattccaaatcacctgcattacagatttggatgacttttgtattacagatttggctacacaatttcaaaacctgcatttgtgttcgtgaggcatctcataacactgtgtgcattgtcatgggctaaaaaggaaggcagagaaacactttggacaatcgaggagggaggagccaagatggccgaataggaacagctccggtctacagctcccagcgtgagcgacgcagaagacgggtgatttctgcatttccatctgaggtaccgggttcatctcactacggagtgcgagacagtgggcgcaggccagtgtgtgcgcgcaccgtgcgcgagccgaagcagggcgaggcattgcctcacctgggaagcgcaaggggtcagggagttccctttccgagtcaaagaaaggggtgacggacgcacctggaaaatcgggtcactcccacccgaatattgcgcttttcagaccggcttaagaaacggcgcaccacaagactatatcccacacctggctcagagggtcctacgcccacggaatctcgctgattgctagcacagcagtctgagatcaaactgcaaggcggcaacgaggctgggggaggggcgcccgccattgcccaggcttgcttaggtaaacaaagcagcctggaagctcgaactgggtggagcccaccacagctcaaggaggcctgcctgcctctgtaggctccacctctgggggcagggcacagacaaacaaaaagacagcagtaacctctgcagacttaagtgtccctgtctgacagctttgaagagagcagtggttctcccagcacgcagatggagatctgagaacgggcagactgcctcctcaagtgggtccctgacccctgacccccaagcagcctaactgggaggcaccccccaacaggggcacactgacacctcacacggcagggtattccaacagacctgcagctgagggtcctgtctgttagaaggaaaactaacaaccagaaaggacatctacaccgaaaacccatctgtacatcaccatcatcaaagaccaaaagtagataaaaccacaaagatggggaaaaaacagaacagaaaaactggaaactctaaaaagcagagcacctctcctcctccaaaggaacgcagttcctcaccagcaacagaacaaagctggatggaaaatgattttgacgagctgagagaagaaggcttcagacgatcaaattactctgagctacgggaggacattcaaaccaaaggcaaagaagttgaaaactttgaaaaaaatttagaagaatgtataactagaataaccaatacagagaagtgcttaaaggagctgatggagctgaaaaccaaggctcgagaactacgtgaagaatgcagaagcctcaggagccgatgcgatcaactggaagaaagggtatcagcaatggaagatgaaatgaatgaaatgaagcgagaagggaagtttagagaaaaaagaataaaaagaaatgagcaaagcctccaagaaatatgggactatgtgaaaagaccaaatctacgtctgattggtgtacctgaaagtgatgtggagaatggaaccaagttggaaaacactctgcaggatattatccaggagaacttccccaatctagcaaggcaggccaacgttcagattcaggaaatacagagaacgccacaaagatactcctcgagaagagcaactccaagacacataattgtcagattcaccaaagttgaaatgaaggaaaaaatgttaagggcagccagagagaaaggtcgggttaccctcaaagggaagcccatcagactaacagcggatctctcggcagaaaccctacaagccagaagagagtgggggccaatattcaacattcttaaagaaaagaattttcaacccagaatttcatatccagccaaactaagcttcataagtgaaggagaaataaaatactttatagacgagcaaatgctgagagattttgtcaccaccaggcctgccctaaaagagctcctgaaggaagtgctaaacatggaaaggatcaaccggtaccagccgctgcaaaatcatgccaaaatgtaaagaccatcgagactaggaagaaactgcatcaactaatgagcaaaatcaccagctaacatcataatgacaggatcaaattcacacataacaatattaactttaaatataaatggactaaattctgcaattaaaagacacagactggcaaattggataaagagtcaggacccatcagtgtgctgtattcaggaaacccatctcacgtgcagagacacacataggctcaaaataaaaggatggaggaagatctaccaagcaaatggaaaacaaaaaaaggcaggggttgcaatcctagtctctgataaaacagactttaaaccaacaaagatcaaaagatacaaagaaggccattacataatggtaaagggatcaattcaacaagaggagctaactatcctaaatatttatgcacccaatacaggggcacccagattcataaagcaagtcctgagtgacctacaaagagacttagactcccacacattaataatgggagactttaacaccccactgtcaacattagacagatcaacgagacagaaagtcaacaaggatacccaggaattgaactcagctctgcaccaagcagacctaatagacatctacagaactctccaccccaaatcaacagaatatacatttttttcagcaccacaccacacctattccaaaattgaccacatacttggaagtaaagctctcctcagcaaatgtaaaagaacagaaattataacaaactatctctttgaccacagtgcaatcaaactagaactcaggattaagaatctcactcaaagccgctcaactacatggaaactgaacaacctgctcctgaatgactactgggtacataacgaaatgaaggcagaaataaagatgttctttgaaaccaacgagaacaaagacaccacataccagaatctctgggacacattcaaagcagtgtgtagagggaaatttatagcactaaatgcctacaagagaaagcaggaaagatccaaaattgacaccctaacatcacaattaaaagaactagaaaagcaagagcaaacacattcaaaagctagcagaaggcaagaaataactaaaatcagagcagaactgaaggaaatagagacacaaaaaacccttcaaaaaatcaatgaatccaggagctggttttttgaaaggatcaacaaaattgatagaccgctagcaagactaataaagaaaaaagagagaagaatcaaatagacacaataaaaaatgataaaggggatatcaccaccgatcccacagaaatacaaactaccatcagagaatactacaaacacctctacgcaaataaactagaaaatctagaagaaatggatacattcctcgacacatacaccctcccaagactaaaccacgaagaagttgaatctctgaatagaccaataacaggctctgaaattgtggcaataatcaatagtttaccaaccaaaaagagtccaggaccagatggattcacagccgaattctaccagaggtacaaggaggaactggtaccattccttctgaaactattccaatcattagaaaaagagggaatcctccctaactcattttatgaggccagcatcattctgataccaaagccgggcagagacacaaccaaaaaagagaattttagaccaatatccttgatgaacattgatgcaaaaatcctcaataaaatactggcaaaccgaatccagcagcacatcaaaaagcttatccaccatgatcaagtgggcttcatccctgggatgcaaggctggttcaatatacgcaaatcaataaatgtaatccagcatataaacagagccaaagacaaaaaccacatgattatctcaacagatgcagaaaaagcctttgacaaaattcaacaacccttcatgctaaaaactctcaataaattaggtattgatgggacgtatttcaaaataataagagctatctatgacaaacccacagccaatatcatactgaatgggcaaaaactggaagcattccctttgaaaactggcacaagacagggatgccctctctcaccactcctattcaacatagtgttggaagttctggccagggcaatcaggcaggagaaggaaataaagggtattcaattaggaaaagaggaagtcaaattgtccctgtttgcagacgacatgattgtttatctagaaaaccccattgtctcagcccaaaatctccttaagctgataagcaacttcagcaaagtctcaggatacaaaatcaatgtacaaaaatcacaagcattcttatacaccaataacagacaaacagagagccaaatcatgagtgaactcccattcacaattgcttcaaagagaataaaatacctaggaatccaacttacaagggatgtgaaggacctcttcaaggagaactacaaaccactgctcaaggaaataaaagaggacacaaacaaatggaagaacattccatgctcatgggtaggaagaatcaatatcgtgaaaatggccatactgcccaaggtaatttacagattcaatgccatccccatcaagctaccaatgactttcttcacagaattggaaaaaactactttaaagttcatatggaaccaaaaaagagcccgcatcgccaagtcaatcctaagccaaaagaacaaagctggaggcatcacactacctgacttcaaactatactacgaggctacagtaaccaaaacagcatggtactggtaccaaaacagagatatagatcaatggaacagaacagagccctcagaaataatgccgcatatctacaactatctgatctttgacaaacctgagaaaaacaagcaatggggaaaggattccctatttaacaaatggtgctgggaaaactggctagccatatgtagaaagctgaaactggatcccttccttacaccttatacaaaaatcaattcaagatggattaaagatttaaacgttagacctaaaaccataaaaaccctagaagaaaacctaggcattaccattcaggacataggcgtgggcaaggacttcatgtccaaaacaccaaaagcaatggcaacaaaagccaaaattgacaaatgggatctaattaaactcaagagcttctgcacagcaaaagaaactaccatcagagtgaacaggcaacctacaacatgggagaaaattttcgcaacctactcatctgacaaagggctaatatccagaatctacaatgaactcaaacaaatttacaagaaaaaaacaaacaaccccatcaaaaagtgggagaaggacatgaacagacacttctcaaaagaagacatttatgcagccaaaaaacacatgaagaaatgctcatcatcactggccatcagagaaatgcaaatcaaaaccactatgagatatcatctcacaccagttagaatggcaatcattaaaaagtcaggaaacaacaggtgctggagaggatgtggagaaataggaacacttttacactgttggtgggactgtaaactagttcaaccattgtggaagtcagtgtggcgattcctcagggatctagaactagaaataccatttgacccagccatcccattactgggtatatacccaaaggactataaatcatgctgctataaagacacatgcacacgtatgtttattgcggcactattcacaatagcaaagacttggaaccaacccaaatgtccaacaatgatagactggattaagaaaatgtggcacatatacaccatggaatactatgcagccataaaaaatgatgagttcatgtcctttgtagggacatggatgaaattggaaaccatcattctcagtaaactatcgcaagaacaaaaaaccaaacaccgcatattctcactcataggtgggaattgaacaatgagatcacatggacacaggaaggggaatatcacactctggggactgtggtggggtcgggggaggggggaagggatagcattgggagatatacctaatggtagatgacacgttagtgcgtgcagcgcaccagcatggcacatgtatacatatgtaactaacctgcacaatgtgcacatgtaccctaaaacttagagtataataaaaaaaaaaaaaaaaaaaaaaaggaaggcagaaaggtgggctgtgcattgagccatgtgttcacataatctgaaggtgactgacaacagagtgctggattttctgtggtctaaatagaaaagtgatgggagaatgggcttttgatcatagaaatgtgttcaagatagccatgtatgagccagtcccgcacggacattgactgtggagatgtagcttggaaaactgcatccccgtcaggttagctgactattgctaattctgatgtcattgattttgtaaatgtgtgtcgattttagaaatgtactgatgctgttggtacaaggaagtttatatctgatttatgtttgttcatagttaagtgtaatatgttataagcaatgtttaagtcaactctggaattcacaggattctttttttttttttttttggagacggagtctcactctgtcaccctggctggagtgcagtggtgtgatctcagctcactgcaacctttgcctcccgggttcaagcaattctcctgcctcagcctcccgagtagctgggattacagacatgcactaccacacccggctaatttttgtatttttagtacagatagtactgtgttggccatgctggtctcgaactcctggactcaggtgatccgccttcctcggcctcccaaagtgttgggatgacaggcgtgagccactgcacacagcctcacaggagtctttaataaggtctacatgttaatcaagtatgagaaatattctaatgggacttgaaatcctcaagaactatataggacggaaaacataagtgtttcatttctcaatgtgtatttatctcctctgtcatttaaattgagggcataacactatggaaaaagtaaatgttaaatctcccaatcctaaacaaggaacgtctgtgttattttcccacagaagaaactcttctcgccctttttcctatttttcattcattcattcattcattcatttactcattcattccttcacttaaacttttttttttgtatccactgtatgcccaggactgcacgaggcactgagtacttagaaatagtctcctgccaaaagtccaagttgcttggctggtttccctctattcagaaggtgatgacatcagtgaggatataaagtagcaagaatcacgaggtagatggcctgggtccagatctcagtggtggtcagaaatcaaacagaccagctacactcagggagtttccacccctctaccacagagaagtgacgccttcatgccttcttttgcaaggttgaattgtgccaaaactttcttttgtagtccagcatcaataggactgccggtccctgtcagatgacctccaagctccttccgctcttactacactgtgggctgtgattgatggaggagggtttacaaacgtggaggcctccagagccaggcaggtaatgctgacccagtgatgtggagtctacggccagtaagagcctctgctttatatgctgggaggaaagccacttctcagctcagccacttttcagctctggacagcagctgccatgcacgatgcaggtccaaatgttgacagtgatgctgggttttaagtgcaaatttccaattttgcatagctaaagagacagtatttccagtgtgcaacctgtgaatgtgccctggttaattcaaatgttaggtttgatctcattttgaagatccctgttgattcgagcatgttgttccatgacatcctaacttagaactttaatggtgttacttatttcccttctaagtttgtgggatacccttttgacccaatgacagtttatctttactttcttgtttgctcttagatgttattgtactttacagagttatctcactcaggctcaacagatgttgttgtataatattttctacttccaggttatgctgccctaatgggtatgtcctaggggaggagggctaagctgtgaatgcattgggatgtccaggatacctatcactccgatatttttctttctcttcatctgaagctggaagtacttggctgtcacagtttttaagatgtgtgaaaagtcaattggaatgaaatgatttgtaataaaaaataagggaatttagttataagaggtcatattttctggtattgtagtattgttttctttcattgttggaattctttgtcccttaggcaaaagttgtattttagggctaagaaatttgaacagccacgaaagctgtgtgtctgggttacttttcctctttttctttttcgttttttctttttttgttttgttttggagtagtctcataacaggttcagtcaagctttgttccttaaatgttctcacatgtatctgtccttgtcttccatttttaagtgaccaggcagaaacacccaaggtaatggcatgttctgagagccccttcccatcacgtgcacaccaagagcagccactatcttcaatttcaatttttaaaattttgttttggggtgtcttctgggaatgttcagccttgatgccctctgtgatcatttacaactgtaaaagtatggcacatgctcagatggccatttcatcataatagtatctttgatcaattatgtattttaaatgtctagatagaaagcaaaaaagtatgaaaggagttatttattctgaaatccgaatgcagtggtgaaagtatcacctattgttagctccctgtatctacctggtgcaaggatgaagggtttatgggaggtttaggcagcatttcctgatttgttgcccatctgcctagcatggtgatctctgccatttcatcccctgggatgacacagtcgtctcataattcttgcttctatcaaacagaattacagtctgctctgagctgaggtggaagaattcatgaagagccaacccacatttgtttagaaaatccattttaggatactcctgtgtcatgttttctgatgggaatgctgtaaactagtgttagtgtttgtagtgcaaaatactttttcttttcctccttggggatctcttggtatcgcatgtacttcaaactggcagatatggtttgcttggggatgctaatgaatgaattacagtgtaggcatttctgcttgaacacagtgtatacattccagaaaagcctagtgttctgcaaacatacacaaggcatatggaaaaaaaagtaggaatggtgcagacaactcgatatctatacttctataatgagaatactcaaataagcagtaataatcctaataaaatactagcacagtaaaaaaagtcatgcgagattcttaatagacatagaaatacagtagttcagaatacctgtgggtatcttaaaaatgataactattgggtactaggcttagtacctgggtgatgatgaaataatctgtataacagagcctcatgacacgagtttacctatgtaacaaacctgcacatgtacccctgagcttaaaataagagttaaaaaataatctgaaaaagtgtttaaacatgaaaatataggattttgcagggttttttttttttttccgaaggtgaaggaagcttaatggaggtgtagggttgtggctgcttagttagtggagcaaggacaaaatgcacaaggatctgagagaacccagacaacacaggtggacagtctgtgctaacagtacaaccacagtgcgaaacagcatcaggtccacactgcattcctctgtagcctgctgtgtgcagctgttaatggacttgcatttcagtggctgttacttgggggcacactgggaaaagtcatttctgctttagcatacttcatttactgacctagggagtgagctaactgatggtgcaggtacctgcattatggcagagaagtcctaaaaaaacatcttgagtccagaactcatgggaagctccagcaaggcacaaagacagaaatgaatgtcagattgattctgtgaacacagattcaaggttttgtgttggtctaaaaggataatgcatcacctctctcctaagagattatagcaaatgagctgtcttcaggataataaaagtgctttagtccacaaaagttcagaaatccattaggttgttagagtcctaatgaccctggctaaaatgaaaatatgatgggatagctgagcacttggagccttgggaagtgacctgccctgttgaatgatatttaaaattaaggttcttatcagtaacaattaaagttcttattcagctcttttcatcagtcctagcatacattcactgtgaagctggtacattggtctacattgattagccccaatgaaagtgcagtgatttaagacacttgtattagttagagttctccagagaaacagaaccaataagatgtgtgtatgtgtacatacatgtacatacacacagacacacatataaaatgtatgtgttatatatataccatatgtacacacatatctctttacatattatttagaaagagagagattgagatatattaattttagggaattgactcgtgtgactgtggaggctggtaagtccaaactctgcagggcaggatggcaggctggagacccagggaggggttgaagttgcagtcccggtgaaaaggtcatctgctagcagaattccctcttcctcctgggagatcagtctttgttctgttaaggtctttactgaatggatgagactcacctacccacattatggagggtaaactgctttactcgaagtctactgatttaagtgttaatctcatgtacagagtaccttcacagcaacatactcacatgtttaagcaaatatctggctaccgtggcctagacaagttgacataaataaaattcaccatcatagccactaagaaagtttttcaaatattctcagttttgagatcacagagcgtttttgaatgcttctagcttgtaagtaacagaaaattcaaactatttgaatcaggaaaaattcctatacatatattatattcccccaccttccaaatgcctaaacactccacaacaaagtaccaaatttctatgtcaactttaaagttattaattttttttttatttcccaagaaaaggcttgccctacatctgcttatggctctgagatgcccctctgggaggtcttattattcagccttgttcctacccctctgtcttcaccctacaatcccactcttcatcaaaatactcataacttcaaactgagcacctcacagaagatacatcttggatttgggcagccatagccgtccagcaagccacacaaacattttgctttgctggactttcctgggcaaattcactgctttctggcttcccttcttcttctccttccttctcactccttccttccctcctttctgcagatgctctgtgaaaggaagacattgtgccaagaagtccaaaggctgacattttaatgaggaacaggaagaaattttttccagtaggaatgggttctatctgctatgcccaactactagtttttgtccccgagttggaagttactaacagggatgtaatagagagcacagggaagccagaagtattccatcaggtataggtcctaaagcagccacaagagagctgctagattcattattccgttcccagcagctcagcgggcactggtgttaaatcacgtcttctctctgctagtcaagggcgtttctagaagtgcaaactcttaggtcccaccgcagactcactgaagcatctgcattttaacagaatccctgaatagtttgtgtgtgtaataaactttgctgagaaaatgagaagcgagagtgtgggatgtggccacatctgctgggcagatgctttcaaagaggcagaaaagacccagaaaaaaaaatgctgaactgaggtagaagagataaacttcgctgacttcaaaattttgcctgggggtgcttctggttatttgatatctgaattttgagatgttcatgactgagtttaccttgaggatacagtcatttatgctccatcaagtattctgtatattttgtgaatgtattcttcaaagacaaaaccacatgcaaaaaaagcacacagaacgttaagtgtacagcttgctgagttttcagatggaatgcttgaataaatcagaatgcaggtgaagaaacagaacattttactacattgcagaagcccagggtccccccccccaatcactgcagacccctctttccagagaagttattgtcctttgcttctgttttgatgttacatacataggttcatacaatgcatttggcttctttcagtcaccatgatgtttgtgagcttgtagtttaaaacttttattttcactgatgtagtctattccacagtgtgaaaataccgcaattgatttatccagtttactaaaaatgtccatttggataatttctgtgtcatggatgtcacacatagtactgcagtgatcatctgtcacaagtcttttggtaagcatatggacatgggcaacacattggtcagaaaaattgtttgcaaaatcactgaagctttccgtgctaactcagggtcatcatatgaagtctagctttatcccgggaggtagtagaatgatatccccagggatttgtggagatggtggttcagcttagcattttaagttaccgtgtggagtgtttgtccttgccgtcaggctgccaaatgacattttactattctcagtacttccttccttcctgggtcttttgtctgttgaagttttggaaaacaaattatcagatacattagaattgtgttttaaaagcactgtttgaatgtagattatttctaaaccaagcaggggtgtctcagaggctgtttttctttttttttctgactttccaacctccttttggattcttcttagtcagatacctgagtttcagatagctggagtgctgccatcattttgaaattataatattatttgtagttttactcctgttccatttttattcatacattaactcctttttcaattttgtttattttggagattcctcaagtagatgctgtagttctaaattatctttttagaaattcagccacttagagagataagcacaaaacatggagttatattattttgaatacaaataagaagtaggtgcccagccaggagtgggcatggttcatgctgaatgaatccactggagtctgtcagtcacttcatatgttggtcactgaaattatttttaatcctttctcttttgagtcttaggggaatgcttaaaaaactacacaccaagataaacaaatactactgctttgtggattctccttgtccactcaagcaaattattgtaataactttatgacaactttctatatagttcttgcatttaaagcaacaattaggcatttattcctattttctttagtagcttttgtattcattttgctgcccagagggtatgttattatccaagcaggtgagagaggagtgcagctcagaccacagaactggaaaccaagggaatgttaaaggtttgggataaaaaaatataaactgagataaatgtaaatatacagcttactgaaattgcttttccttatctgatgaaccagtgagttaagatgatgactcaattaagggaagactggtttttcttttcttgacttttcttgggggttgaggtcagcctctgttggcagatggtgtttgcagatctgaaggctgtttgctcttttagtgaactgtggctttgggaacacaaaagtggaccagtggcaggacaactgatccttgaataatgtgccaaagtcggattttaatgagatttttggctacctttttttaaaaacacacttcagaaaatcacccttccgttctgcagaaaatcaaatgaaaaaataattaaactttccagcaggttgctgggaaagcagtggagtggacagatgatgggcagtggggtctgtctcaggaggcttctgctttgtggagaatgtaccccaagcaccatggagtgagaccgggagcctctcaaagggtcttacttcactgttgaaatgtcaaattagagatgtcagcaacattttatttcaaaggggaaatgtgtttaagaaattcataagaaaatctctacaactaattttacttggtttgatacttttgatctatttttgtatgttttcataaaacagactgggacactgttattgatttatctttgtgtttgatggttgggtagcaaggtaggtaggtaaaaatcagtgattcttaaaattaaaagtagattataaaactcggtgacatgtcttttgggacactaaacaaataatatcacatatataaatagttttaacataattcaaagatgtcatagacaataatttcatgcttaattacattaactgtcatagaaaactaatgtaacctttgaaataggcttttaaaaaggccagagcaccgggcacggtggcgcatgcctgtaatcccagcactttgggaggcccaggcgggtggatcacctgaggtcaggagttcaagaccagcctgaataacatgttgaaactctatctctactaaatacaaaaaaattagccaggcatggtggcgcgtgcctgtaatcccagccacttgggaggctgaggcgggagaatcgtttgaacccaggaggcagaggttgcagtgagccgagatcgtgccattgcactccagcctgggcgacaagagtgaaactctgtctcaaaaaatatatatataaaataaaataaaaaggccaaagcaggttgtgtagaattctaacaaattttcttgccagtgttatgtatatttgagcataaggtttatttaactgtaaacaaaacgtgatgaggaaccaaacagttatctttccatgataccaataataattcagaattaaatgccaactatttaataatcagtggtaggtattcaatatataatcagtgctaattcaggaaatatatttgctattgaatgaacaagtagaatgcacttatatattccagaatgtactgatttcgaaagagaaattgttctttactggtattcatgattctgtagtatattaataaatcatttggagattttagaatgacaagcaaatccttatcttttgtagaagctatggtgagttatctatgtatgcaatatgttgtctttgttgatcgccatagaatcatgtaatttaatttatttttggaactcacatatatgttattaacaaatataaataatattttgttaaaaatgcccccacatttattattgaagtatattcaaaatatattcaagatttgatacattggtttagccattcagctgatgttgagattgcagcaacctcagcccacaaaaacacaaacctgaggtggagtgtattcatccatttttgtactgctttgaagaaatacctgagactgggtaatttataaagaaaaagaggtttaagggactcacagttccacatggctgggaggcgagggaggagcaaaggcacatcttacatggctgaaggcaagagagtgtgtgtaggggaacggccctttataaaaccatcagatctcatgagacttattcactatcactagaacagcaccaaaaaacctgcccccgtgattcagttaccttccatcaggtacctcccatgacacatgggaattatgggagctacagttaagatgagatttggctggggacagagccaaaccatatcatggaacaagataaaggggcctttgcatgtcagaaatagttccagataccagcaagacagacagtttcttgagttggacttattttcagctttcttagcatctgttatatggtaaatagtgggcgcatccccattgaaaacaatgtgaaaggagaaagggaaaaaatagtgaagaaggcagcagcacgctgaagactggtgcatgctggtgcgtgtaaagttcagatggaatctgctgtgctttctagaatctcctactttctcactgtgttcagcaggagagaccctttttatcttggcaatcatatttcccatagttagtcctctccctaaccctgtgcaggcaaggcttagctgctcactccttcacactgttgccttctttgtcctctctgagtcagagttctgagcctgtcgcagatccagtataaaactccaccttctccacatcagttcacgttgagcccttcttctccagacctcctgcctccttccttcattcattaatggagaagctgctgcaggtcaaacctgtaggtgccgggtgctacaggggatatgagactgatagggtaactgggaaggtaaaacagccacagaaaactcaatacacagaactcagataaagagtggcaggggataggaggggagggatttccctgtgactggagtattcagggccgactttcagaggtgacttttgggaaagccttgactgatttgtagcatttggcttctagatagcatatatgaaaggcttagattctgatcaaagactgagattaaaatatactttgaaaagggagggaagaatttgtttctcaacttttgcaatctcaaaaattgaaaaaacaaaacaaaaaaaccagaacagtgatgtgaaatcagtcaagaaaacatgcttcatctgaactttgtctccttgttgaaaagttacatattttgtattgagccttctacaaaatacttgaggacactgagcacctaaggatggaaaaagagtgaagaaaatgagacagaaaactagagtggccatagaattgattccctaaaccaggacttgtttgagaataaaatgaggataactaatatactttaaattatataattttatcaaaacactattttattatctgacaaattgtttttattatatagtggtcctatgtactagttctagtcaaaaattttaaaaataaagttatttgtaaaatatataaaaggtttacgtacattgaagcaaaaattcttatcacttatgtgaatattaaaaagtgcatgtgcaaaatagtactggaatatattcacgtattttaatgttaattctatatctatctctaatgccagaattagtggtacttttctgaagaatacatcttcgttcaatgtggtcgtattcttaattttttctataatattgcttgtaatctttagagttatggtttcattttttgactattaaatttgaaattgttgacatcagcagttgactcttctgtgtagatcataattttttaattaagaagacactctcaagtgttgaactataattgtagagtaaattctaagtggaggatatcgtaaattcttttttgtcttggtattgacatgtaaatgttaacatatgtgaataattcagtccacgattgtcacaggttctatgtctttacctcctttcaaaatactttctttaacaaatactttgacaaatttattaacatttataagacaagacttaccaagttgtgttcgtttatgattctttaaatgttttccaatacttagatacatcaaaattataggacttctcaattccatcctattgttacagaatataaatttaatcaagataggaagaccctcaaaagatctttctcatgagttcagatattccaaataataattacagaatttcatttgtacatttgaactcttatcattgaatttgtttaattccttagtgtcttcctgttttcaggcttacttttcaattaatttcagtctgcaaaaagcttcaaaaatagatggtagcttttatatggttcctaatgttgagtgatttgattaaagttttccaactgattttgaacaaaatgtaatgaaagcttagaagactagtttacaaaaaaaaaaaaaaaaaataggacatttacaatgatttgctaagtagttcttcaaaggctcaaagatttccaaaatctgaatggtgataagccacaatgagagaaaatgactattgcaaaaatgttgagataatgtaattatgtgtgtcaatatatttgaaattttgacaacatttcagtctacagaatattaaagtgtatttggattcagttatatgtgccaccaattccagtgtgtttctacttcacagatttcttaatttggtaaaaatataatttttactacaatgctttattcttttatttttcatggaatttgtaatagcgttcgtaataagattgtatgttctatctttgacagaatgaacttcctgaacgttgattccattcagtggatggggaaaaaaacaaaccagtgctggaattgatgcaactgtttatttttttttttgaagcatctcattgcattgatataaaactagcctcatttacctttttgaagttcttcttctgctagtgcaggcaatatacacagctctcatttcactctttgcatttgtacaagataatctgtaataaaaatttgtgcagaattaatttggaacaagtctcttgacctaagaaaaaagtcatgtttcacaggtggtatgtaagtaagccttctgcagctgcatgagtaaaattgtagactctgaagaatatggttgtcttaaaagacatagttcctgttgctcttcaggagatttatattttctggttttcatgtggctaatgataccactgtatgtagggcaccatggtatcactttagggcaccatggtgcaccatggtggaggataatactgagaagctttttttaaaaaaaaacaaaaacaaaaaaacgaagatggtatagtgttcccgtgtaacctgtactcacttttccttatttattaatatcttgctttggtgtagtacaattgttacaattaatgaactgattattgattcactattattaactaaagtccatattcggatttcctcagtttttccctaaagtcccttttttgttgttgttccagcatccatttaggacaccacgttccattttgttgtcatgtctccttatgctccttttggctatgacagttaaccatttggagcagttatgcatttatctactttcgaggttgttgctgccagaagagtttactgcgaaatgtaaaagcattgccatccaataaaataactagatatacacttaaaccatataaaaaaggtcaactcactgtagcaagagcatccgaggtactctccattgctctgaggcaggcctatccaacttctgttttctgtacatatttcatgtgcactatgcttgtaattttccaatttcccactgacttgaccacacggctgcctggcagcattttgcacatcttgcagataggagcacaactggctgactttccaggtggttggccgaggcagctgcttccaatctttctccaccaccatctgagtcctgaaggagttttctgtctgcagcttctcttgtccaagcttaatttgttttatcagtgaatgtgagtgttctgcttcctgcccctgaaaggaaagttttagttacattgtgtctggaaaaggtcaggaaaggagagatgggtttattcctgattatcttctgatttagccacatattattctatcttttcactgcatggatgtctcacacactaacaggtgaaagtggagatacaacaaattcaccctggattgttttaatgcaactgttaataagcttaaatgtacagttggtacacagtttaataataggtaatacatgttaatgcaacttgttgattaaaatgaaagggaaattctagttagatgcttcatgtggacaggatacaggacaacgaacataaactgggactgtcctaaatctgggaaggtgacagatgtcacctaaagagaaattttacataaaaattgatattgtattccttttttgcttctcagctcctttttttttgccaaagtagaaatatttttttccatgaaaaataactataatatacctacttgcgctaacactactagattatgcctacatttaacttcactcaggttaagttgatagaagagaaatacggggagagcaaatgtgcactgcaaggcaagtgctcttaaataaagagctgcatattcttacatatacatgtacacacgtatagcacatacatactgtaatgtcaacagaatgaacttctgtatatgaaaaagtttgatctggacctggggcacgatgtgaataaaagcctgttcatctgagtgtggaagggtgaggtctgcattgccccatgcacattgctatgctcagggccttatgttaatagatggtaacgggtcagcacagcaaggctcatctatccctctgcctgttagtgtaaataaaattttattgaaacacagccaaacttattcatttatgcattgtctaggctgctttcacactgcagtgatagggctaaatagttgcagcagagatagtatgtcctgcaaagccaaaagtattttctacctggtgcttcacagaaaagatattatgtacccagggactataacttttgcagactgaccttgaacatgacctaatttaattgtcccttttcagttcccagagtactgccacgcgtaagacatttctgtccatggagctcccatactacaagattttcttcctttgaccctttttgaaacaccacccagacatggacaggagacaaccatctacttctttttaacccagttggggagtggagttaagaataataatggatggaaacagtggctggcacttactgattaccaacattgtaccatgcactgtacctcacagctaccctttgctacccttaggtggtaggttatacccactttatggttgaagaagctgaagctggagaggtgaagtgtttggctctgagtcataaagcagatgtggtggaggaagcatttaaatctacccaggtcattccacttatcctgtgctgtattcatttatgactgcagaagccccagttgttttgaggctgtgcctgcagtaaagcgtcagcatgatgcttcctgctgtttctatcctcctgcctccattggtgaactcccagtaactaaatatcagtgattgaaaataggaagcaatttgtaatctggattgttcctagacattgaatggatctagttaactctctcatcttccagggaatttccgttttaatatcttttggggaatgttataaaaatagatacttaggtaagtaatatttctcaagatgacacaaacccagaaagaattttacctgcaggagatgtgtgtggttaaggggccctgggtgaggcatttctggtttaaaatgtagattagaaactcctctgatcagacaacagcaaaactgaagccagagaagcctcagcccctggaccaggttgtctttccaagtctgctggttgctgtggccaagttgaggagaccattgtttgttttctctagattggagagctggatagccattctgtatgcagactgagaccacagccagtcgtaagcaactctattagtgggaagaggtcatcctgtctagaaagcaagacttaaactttagaaagggaattaatatttttctgttctagtagcatagctggatttggcccttagaatttattttctagttaatttggggtttattctggaagcatgcatactatgtaataaaaatacgtttttagaagagtactttttatttaactcatatgggagaaaaaggataaacctttgcacttactgactagacaagtgtgattcgttcagggcatcgaacgaagtaggctaactggtattacattagtaagaacataatccttgttcttacccaaaaagagaaataattatactaccagattttagttgtctataatttacctattctagagtaaaagctggtgacaactcctgaagttctacatttctggattaaatgataatggtcttagatttatttttatctctgcacatttatttcaaaatcttttgtttaattccttgcttcagccaaaactgtgaaaatgcaaactcgatcatgtcatctcttgctttaaatcttgccatggcttcccatcctttcgggacatccccgccgacccccttcagtgcgctttcggtccttgaggatgtgctcatcgggctcctgctaacttctccagctccagctctcctgcctgacgctgtgcacagcctgtggctattgatgcctgtaagagaccaccccctattgcaccccctttctgcctagttgacatctatgcatacttcagggaataccccaaggactggtcatgttcacctgttctatgctgtcagtgcatcttgtacttattcctcacagaacttttcagtcatagtcagtcctgtgagctttatgcaggaaggaatttggttggcttcctagcattttcaagatctctcatggcgccccttggattgcatgcatgttttcatgtctcatgttcagatgctaggatcttagcatcagtgttcttgtggcattccttagtatagaatgatgaagacattggcatttattactgtgtgctttcgtttacaaaaactgggttctagatgcataaaacatacggtttgagtaatttagctccctattttaatgcttaaatcagcatgacttgggatctaaaggccagttttcctaagcaccctactggatcactgtgtttcttaatgtggagtgaagttgtctgtacttaactggttcccagagatgtcctgagatcagtggtgtccaagcattctacataccagccctactgcattccagatatataaacataaatatatatgtaatcttctgagtaaaatgttaatcttatgaaaatgggtgcgtgacctttaaaaagttttatacatcttaggtatacctgttttctcttcaagtacgtataatttccctctcagcttcaatgggaatatttgctatttaaggttcttatttcccagggatcatttaaaaattttaagttgtgaagttttcatcagtaattagccattgctactgtcgttcatacaaatcatcatataatttattgaacaagaagataaatgacatctaaaacattgataattcaaggtacatttttctctaattgcatttcacttgatatcttcagacacaaattaggtatattagtgttggttgctctctcagcacagatgcagagacttcttttgtcttgactgactaatgcttatgacttgatccttaatctttctttccctagtgtttgccaagtacacctgtaaacagatctgcatggtatttgagagtgcaagtgtaattgctttagatgaggccctgggtccttgatgaattcaaaatgctttcaagccttgtcactacttgtcacccttctcagcactcacttgtgccaactgggtcaggcccagaagaaaacagagttgtgtgtgtggccattgtatcgtttctgcttgtttaacctttgacgtcagaaggtaggacacgggaagaggccagtaactactacactcttgtgagggaacaaaaattatcttggcaccaagtaatggtgccaagtttattgagttgagaaatccacaggtatttagctgcccaggagaggcacagaatataaatcttacgtagagggaccaggtactatcttttgctatgatgaagtattttttgttttgttgtgtttttccttttcctatcaggtgtgagaattgccaagagtgttatgttacagtctcttggcataccccagaaggtgcatcatttccacagtatagaccaagcgaagcacacaggcagatgggggcagggatggaaggtgggactgtgcccactgcatgtaatagtccttcccccagatagctttaagtaaactaaattgtagaaggttatctcatttttatcttattcatgctttcattcttttaaggagtcctcttgtaacgtgggtaatccttgtagcaataaaacatgtcctcttccaaagtaattttttaaaaatcttgttatattacattttcctaaatggaggtatgtacttaagacccctgaaaactggcttagcacttacttttggtgtgaagagctagttcttccctagagagcccaactctggagccaggtggattgagtgggaatcctagctctgctaaagggacgtacttgcctaagtctcctcctcagtaaataggatactagtgataacatcttcatagagttgtcatgagaattaaatgaataatatatgtaaaggcttaaatcagcacctggactacatatataaggtgatcaataaatatctactttggtatctgaatgcttcaagatagccttttgttcccttctaaaaaagagtgggtagtgattgttaagacttacccgctcataaatgttttattacatacttaatatgtgaagctatcaagtaaggaggtaaggaagtatgttaatagggaagaagatgataaaatacccaaataggaaaccataatgccaactttctaagcttaagctgactgtaacaaagaactggctttgtaacaaagaacaagtcttactggcttcatgcaatgcaaacatttttttcttacgtatctgacagatcaaggtggtcaggtagctctcctgagcagttttccaccatgtggtgattcagggatccaagcacattctatcacgaggcttagccatattggagtttttcacttcggtgatgaggatgagggagaaagtgggagagagtgaaaagagggagaaaggtggaaaagggagaaagaaggagaaggtggaaaggagagagagagaaattgagaaagtgagaaagaaagaaaaaagaaagaaaatgtgctgaagattttgtaagcgattttagaggtcaagcctagaggtggcaaacacataccatttctgtacccactccgttttctagaactagtcacatgactccaacctaccagccaagggttctggggaatcagatctccctgtgtgccctgtaatgcaaagcaagatagttgagtttccgtggtggagtcctggcacaacagttaaccatgtgacatattttctgttagtggcagacatttcctgtaattattctatttgtatgcttcactgtaaactatttttgaaattctctgtaatgaattccagaaccaacacatgacccaagaatttacaaatcattatgtttctttctcattttagaaatttgcaaaaagtgagggaatctactgagatgtgtacttctgaacattttgatgttgtacagatagccagcaaacaaggactctaggtgacagtatcttttttttttttttgtgacggagtctcactctgtcacccaggctggagtgcagtaacatgatcttggctcaccgcaatctctgcctcctgggttcaagcaattctcctgtctcagcctcccgagtagctgggactacaggcgcccaccaccacgcctggctaatttctgtatttttagtagagatagggtttcaccatattggtcaggctggtctcgaactcctgacctcaggtgatctacccaccaaagtgctgggattacaggcgtgagccaccacatccccccactcggtgacagtatcttaatgacaccctgacaggcagggttctattaaagagcaggtttttatgctttttaccttcctggtagtcagtaaatgacaaaggcaaagaagttaatgatccattgaaattatgtcagacaatctaagagtagagatttttctttcactgccccgtaataaatatggcttactattgcaaccagaatttgtactcagctctgatgggaaagataatggcagttttctgtgtcttataccaccaaataaagagacttactactgcaggtttattaataatattttccttgagcaattcttttgaatcatgattggcctctgtacagatcaagcagtttgtttataagaacaagcctggggccaggcgtgttggcacacgcctgtaatcccagcactttgggagggcgaggtgggtggatcacctgaggtcaggagtttgagaccagcatggtctcagagacatggtgaaaccccgtccctactaaaaatacaaaaaaaaaaaaaaaaaattagtttggtgtggtggtgggctcctgtaatctcagctactcaggaggctgaggtaggagaatcgcttgaacctgggaggcggaggttgcagtgagccaagattgcgccactgcactccagcctgggtgacagagcgagactcagtttcaaaaaaaaaaaaaaaaagaaggcaagtctgggagagtttacagccacatggacacaccttggggccaggcttaactaagcttcagagttaatgtgtaccttacgtttttcagtgtttccttggtctgtggattgattttgaatcccatttcttctgccagagtttagctatttaacacatagggaagcagtatgattttatggttgatcaggtggcccacagcttgagactgagtttgaatccttattctgccacttaaccaccatgttaccatgggccctatatggtatttgtttgctagggctgcctaggtatttgtggtaacaagcatcacaaactgggtggcttaaacaacacaagtttattttctcacagttctggaggctagaagtctgatatgactgtatcagcagggttggtttcttctggggcctgtctccttgacttgcagatggctgtcttttcctgtgtctttacatgatcttctctgtgtgtatgtctgggttcctatctctttttataaggtgaccagtaagattggattaggagctattctaatgaccgcattttaacttatttacctctttaaagacccatttccaaatatagtcacattctgaagtactgggataataaaggtacttcatgatgttgtggtgagcatttgaagagaggatgcatatacatttccttacacattaccaggaatatggtgactactcgctacgtataactatttttattacaattataaattgtattctatctgactgtcttcttttccaattgtgagatggctgtctgcatggcttttcagttactgaggcctaggattattgtcatctttcttgcgccctcatagcatcttaaaatgctgccttcaacagagtaatagggcaaaagcccaaggaatgttgatcaagtgggtgggtatgaattttgtgctcaggatttctgagtggtcttctgtggctgttgctttggtgtcacaccatagatggctgtgaaatgctctcagacttcttggttcctggagtggcctgcccaaaaactagacgagcacctggagaagagtaatctctccatgtcaggggcaggagacagaagttgttgtgcattgtcaggggagaaactgtaaaatcacagaaccagatcaccaaacataagaattatccaaacgttggaggtgatttttaaatcaggcagtgtgtcaaagtgattggctttcctgcaattattagctatccccaacatttctggacttaatgagaattgatagaattatttgatgctggtattatggtaagttatcatctcatgcccaaagaattgactgttctcaaaatttttggtatttcttgtttcaactggtataaatgttctttgctttaaaaagtgttgctactgtcacaacccggtcacagcctttgttaaatactagcaagcagggatccactaggatcagaagaagaaggccagattgcagtctctgatataagctgtccaaggaggccaatatgcagcccatcaatccggagaagcatggatacgctggggaatagtgggcttattaagtctacacctggctatagcatccatccatagcagatgagttacacaggcttcattaactagacacaaagggtatattattcatacatcatgctacattcctgtcggtgaatcagctcttaaactgtgagtcacggacaccaccaccctcaccaactagttcctttatcctctttcagatcagctactgaatctggttaatttttcttttgaaatacctctgaaaatgtttatcttttagtaaaagattttaaataataactatgaggactgtcacaaataaatagtgtgatacaataagaaatatgtagttggtctttgtcccatcttcctggaatacagctcctaaaacctttggaatctccagaatgatgagtgtcttttgtatggtagtgagaaggctggtagctggggacccctagaccttcaggatgggggctgaacatgattaagattaagaaagactgacgtgattagaaggttggaactttcagccccatccctgacctctggggaggagagagaagctgaagattgaggtaatcaccattggccagtgatgtaatctctcatgtctgtgcagtgcaatcaccataaaacccccaaaacaatagtgtttggagaactgctgggttgatgaacatactgaggagctgggagggtgttgttctgtgcacccacactctgcttccataccttgcccaaagcatctcttccatttggccatcctgagttatattctttatgataaactggtaaacctaagtcaagtgttttcctgagttctgtgagccatttaagcaaagtatggaactgaagagggggtcacgggaacccctgatttataggtgattggtcagaagtgtacgtggcaacctggaacttgtgactggtatctaagtggggagcagtcttgtgggactgatctcttaacctgtggggtctgtgctgactctgggtagtgtcagaatgaaattggattgttggacactcagttggtatctgaaatgttggagaattggttggtatgaggaaaaaatccacacatttggtgtcaagagaattgtgactgacatcaatgcaaatatatataaaaatgtgaatttatatgaagttacttttagctgaccgtaacataataggtatattcattgctgtggtttggctgtgtccccactcagatctcatcttgaatggttatccccataatccccatgtgtctagggagagagctgttgggaggtgcttggatcatgtgggcggtttcccccgtactgttctcgtgatagtgaaagagttctcaggagatctgatggtttaaggaggagctcttcctccttcactcctcactcttctctctcctgtcaccatgtgaagaagatccttgcttccccttctgccatgtttgtaagtttcctgaggcctcccagtcatgtggaactgtgagtcagttaaaagctcttttatgtataaattacccagtcttgggtatttctttatagcagtgtgaaaatggactaatacacccactgttatgacgataaaggctgaaacatgtcttatcaggggtggatgaaacatggaattaagtaactgatttaatgttacctaatttttctgtaaatttatatatctttctattaaaattaaaaaatacacagcaggaacaacaacaaaatccttccttattagtcccttgctgtgcattttcactgtcctcgcaggccccatctcctattgtggggaaaaatccaaccatatctcctgactgctgtcttcccttccttccgttcattctgtgattgctggtttttctttccttagttcttcatttatgtttctctttcttaaaagccccctgcagagttgcctttaaaattttataattggtttaatttttatttatttatttggcagagaagagcaagttagtaccttgtaccaaaacatcaaccttgtggagccaagattaattcagccatatgaacatgttataaagaacttcatccgtgagatcagacttcaaagcacagaaatggaaaatttggccattgcggtgaagaggtattgaagtccttcctttataagtggcctgtgggtgctttaacttgctctctgacctgggtggcaaatggactgaactgcattgtcacactatgatataggtggacttcctgagcctgaggagtctagagctttcaaaattaagccagcaatggagaagtaggtcagctaccaatcaatcagtagatcatcatgatcctattatataaactcttcaggatcaatgatgacttgatacagaacaattaagagatttatcttacatccagctgcttaaaacacacaggaaacttttatctagagaagtagatggaacactatttgaagcctggccttgttacctacatgtatgagactttgtgagcaggttacttaatttccctgagtctcaattcctgcaactgcaaaatgaggatgaatatcttcacgtcctccaggtgttaagacttagtggatgatgtcatgggtgagccctgcacactgcccaccacatggtgggtgctcagcagtgctgctttgactctctctactctctagccctcctcacttggccctccccctttgaactgaaagccaaagaactattaaactcttactctaatacagtccatttaagccatagctagcttacataggatatctttttggtgttaacagctatgtcatgcaaaaaaaacaatttatatgtgttgcagtccaaacgtcagcctctttgccccctggaaaaactgcattcctttagcatgtattgggaaagagagggcattgtgcttgtcacagttcttgtgtgttgtgccacacggatgctccttgctgtcgtgtgctccaccaagagctcccaagacgctgtgcaccctgctggtttctgcctggagcttatagatgcagcccttttaataggaggctgccctgtctacataggggcgggtgacttgtcttcaattctgctgtctctttatccttcccatccacatgatgctgaaactgtctagttgaacctttggttcattacgatgtagaaaagaaaatattttaaattcttggtatgaaataggacctttcttatcgtcctggagtcaagccaaggttgatctattcacaagggatttcttatgaacatttttagtacttgactgaccatttttctctcaaattagccttctaggggccttccaggaggataaagggtggtcctcagaactccagagtctgtagagcattctggagtgtgggtcagagtcccagagttggtctcctttgagatgggacaggcagacacacacattgattcttcagagcatccaataagtattaaaacagacaaactcataggtacacacataggtacacatacacagacccacacagagatatgtgggtacacatgcatacacatgccccccatctaaagataataccatgtaaacctatgaggaaaaaaacagactggcatgcttgatgttctcattaccagctaggctgctttttcatggtggagtgagtacatcatattaatttgagctgtgttggtgtccccatccactcccttctgtgctgctggagggatccagagccagcctctatgctgagctgaagtctcctaaagcctcctttcttagctaccaaagacctcaggaagtgtttaaatggctacttgtaaaccattccttgcatgcttagccatccatcctcactgctatttttaattgggggagggttttggccattttgttctgcactgcacctgaagaaggggttcccagtgtcctggagggagccccggactaggtcacagtgggcagacatttcaccagaaattggaaattgctggggcaagcactctgtgattatgcatcaccctgatttacaaaagaagaaaaatgttgctcagaagtgaaaagggcagagagagtccattacggagcagtcccagatgcttgggattggatagctagaagaagtaggtgggaaattatcataacagagggagaaaggatatgtgccttagccatttacagtcccagagttgaccaaaaaaccgccagacattgctatggagatacacagtttctagacttcaaatagcaggtatttataagcagaaatgaactgacttcccaagcttggttaacataacctcggacaggctataagatgaggaagaagtaaataggaacagaagataataatgttactgaaaattttactttggggtctttttcctcccataatacttccttggagttttatgtggaagttgaaccaatgcatgaataaattgtgttgtgtgagggagtaaataagtcaaaagcaggtaagttgctatagcagagacccatcaaactagaagacagaaaatcttatatttaagccctgtcatttattaatagcatgtcatttgtccgaatgaatcacctctaaagctcatggtttagatgcaaatcaatgtgctctgtctccatagagatgtgatttataattgcactcctaacagaaacataatttttctaaaaggtaaccttatctacattctagaactttaggggacaaataagaataatgattgagatctttttttcccttctcactttaacatataacattgtgagttttatatagtgaaatttcaaaattatatataaccatcactttgccacagagttctttttttaatccagggttgtaactcagtcatgagagcaaaaaaaaattcagaatttattgagagcctcccagcactttgatatctttactgtttgccacaatctagtttaatatcattttatccaatttattaatttatttaatatagtcaggtaccacatcacaatgttttggtcaataaaggattacctaaatgacagtggtcccataagaatataatcctatacttttactgtatctattctgtgtttagatacataaataccattgtgttacagttacttccagtattcagtacagtcccatgctgttcaggtttccagcctaggagcaatatgctattccatatagcctaggtgtgaagtaggctttaccagctgggttggtgtaaatactctttatgatgcttacacaatgacaaaaatctcctaaagacacatttctcataatgtatactagttgttaaggaatgcataactgtatctagttttaaaatcattttacaccaaaatggtcgaattgccaatctcattttattatgtagaaggaatgggaaatcattttgaatggggtgtttctcttcatctgtaatatatagggcttaacgtagatgaatctgaagtttctcttcatgtttcaagttcaagagtataatgaaaaggtgtgcatccttttgaatttcagagcccaggacaaggcagctatgcagttgagtgagttggaagaggaaatggatcagaggattcaggctgcagaacataagacacggaaagacgtgagtttctgggttggccattcattcagcagatctttatgaggtggtttctacggagagggcccaggcactcttctgggtgtcatgcaggggtacagcaagtccaggtttctgcagagtctcccagcaaaggaatttttactggtggtggtttttggggatggggtaagaagaagtagaaataataaataagcaaagcaaataagttcagatagtgacaagtgcagtaaagaaataacatgtgccatagtgactgggggaggaggctgcttaggttgggggtaagaggcctctttgaaggggtaacatcagagatgaggccttaggagaaggcagaggcagccttcatagagaaggtggcttgactttccatacctgtgtctgcccacacctgctgcccactttaaatctagattagagtgaaattaaaattctgtcttcaaactttggtgttttataatggaatacagtcatcacttggtacccaaggggattggttccaggactcccctgcaaccccgcataccaaaatctgcatgctcaagtttttatataaatggtgtatatttacatacaacctatgtatatcctctagtatactttaaatcatctctggattacttataatacctaatatttaacacaatgtaaatgctttgtaaagagctgttacactgtatttttatctgcatcacttttactgcttaaaatattttcggtctttagtggttgaattcgcagatgcagaacttgtggatatgaagggctgattgtatgcctttattcagcattataggaaccatttaaagttgaaagtgatatgttaccttcagtgatttccattgaagaaataatttttttataaaatatttttgggtgattaatgtttattgaaaacagaaaatagacaatgctaggttaaaacttccacttttgtttattaatttgccctgttaacactgagtggcagcaaaataatgtacaagtggcctgaacattggcatctgggagaccttagtttgcatcctggcccagattgtatctaggtggcattgggaaaataacccaacctctgagcctttgttattccatctctaaaatgggataatgcaacctacctgccttcacaggggttagacatgatgatctatataaagtgcctagcacggtgcctgcaatgtagtggctgcaccctggttgttactgtcctgctttttcctgtggctctgtgtattcctgattccttttagattcttcaccttaaatggctttaccacatatatgccctggggtgtctttgttgtcctatcttcttataaaaagtttaataagaagctggacgtcattttcaaccacataaatggtttaaggttcatggtccagcttcagagcaatggataaccccttcttcagctagcactttccttttggtaaaaaggaaagagtgaaatcatttttctgcctttttttctctccatctgctgtgtttaatctgtgcacaaattcattcatcaaacacttatcaagcacgtgttattctgtcatcatatctcattgcttcttccagataaatgcctcccaaatttgttgctggtaatggggatattaccatggcccccaccttttagaatttcatgttttgttaattacaggatcttctttagtttccttggcttcagtccggtagtggcaaacccatgcatccacagcatcatttctctattccacagcaatgacacatgtggcctgtcagtcaccacatacatgtggtctccacacctcagcacgccagtccaggacgtcactgccagctgagcagctttggcactgcgaggaaacttgtttgcctgtccatcctagtgtccgcctcacacctttctaaacacagcctctctggaataatgtgcccaggccagtctaagatttttccctcatttccttccattccacatggctcccctcggctccccagggttcttcgcccccagccctggcccagtggcctcactgtgcctgaccctgctttggctccagctgttttctttgtcttgatgattatctcttcactcctttccttcttcccaaattctgcaaagctcagaggaaccctcactttcttcttgatgccctgccctgctcctgtagccacattcacctcttcctgtccttgactcctatggcatatatagcatatattgcattacttcagttagtatttttttttaactgtaacagctttatgaaggtataactggcaggcaataaactgcatataaagtacagtatatgtgaagtttggacatatgtatgcaccatgaaaccattcccacaggcaagatcatgggcataactatccaccctcgaagtttcttcatgccccttgaaggcataacaagccttccttcctcctttctttgcccctttttgccagataatcattgttctattttctgtcgctgtagattagtttgaagttttcagaactgtatagaagtggaatcatgcaatatatgctatttcttctctggcgttttccactcaacataattgttttgagacttatccgtgtaattaatagtttgttctttttcattgccaagtagtattctattacgtaggggtaccacagtgtttagccattcatctgtagaaggacatttgagttatttccagttgttggctattgcaaattaaggtgccatgaatatgcatgtacaagtctttatagaggcatatacttttattcctcttgagtaaattcctggagtggaatgggttgatcatctatgtagatgaatgtggatttttgtaagatactgcaaacctgatttccagagtggttgtacagttgtatgattcaatcagcagtgtatgagagtcccattctttcagcattctaatcggtgtgtagaggaatctcactgtggttttaacttgcatctctctaatgactagttgtgtggaggatcttttcgtgggtttatctgccatgtgtatatatatatattttttgctgaagtatcttattaaaaatctttggctcattacaaatacagttttttttaaaaaattactatgttttgagagttcttttatattctgaatgcaagtcttttatcagatacctgatctataaatattttcacccacaccgtgacctgtcttttcattctcctaacagtaagagtataaatttttaattttttatggaccatactttttttcatggaccatacttttcatgtgatctttaaaaatctttaactcaagattttcccctgtgttttcttctataagctttattgttttaggttaaattcaggatccattttgtatttggtgccaagatatggatcaatgttcatattttttttatgtagatatccaattgttcccacacctttattaaacaagactaaccattttccactgaattgcctctgcactttatccaaaatcagtttattctatttgtgtaggtttatttctgggctctctgttctgttccattgattgatttgtctattgttatgccaatattacattgtcttgatacctattggtttataatgtcttgatacctgttggtttataagtcttgatacctattggtttatagtatgtcttcatacctattggtttataataagtcttgaaatcaactagtattagttcttcttcaactttgtgcttttttaaaagttgttttgcctattttaattgctttagttttcaaagaatcagcctttcaatttcttttaaaaaaaaaagcaaacaaaaactaaaagtctgcagggagtttgactgaacttcattgcgtctatagatcaatttggagagaattgacaacagtattgaaaatatgatttctctctctatgtcttctttcagcaatgttttgtgttattcactgtacagatcttgtacatcttagatatactcagtatgtcatagtttgatgatactgtaaatagtatttctaaaaatttcaatttctgattgttcattgtgaatgtatagaaatacatttgatttttgagattggtctcgtattctgtagcattgcttacattgtttatatgcagtgcctttttgttggtagattttgtcattttctaggatgattatgaaatatattaataaaaacattttatttttctttccaatttgaatgaagctttttatttttcttgccttattgcactggtaagaagaataaaggagatgagaacattgaatgtgatgttagtagtgtagtgttcacagatgcctttataaatgcagtagagtcccttctgttcctagttggctgagtattattgttgttgctgttgttttagtcaggaatggatgttggattttctcaaatactttttctgtctcatgatcatgtttttttcttttttagaatgttaatgtggcaaattacattgattgatttttgaatattaaaacaaacttgcacttgagctaggccctaattagttatgatgtattatcctttctatagattgttgaattcagtttgctaaattttacttaatatttttgcattcatatgtggaagagatattggtttgtacttttaatgcttttgtcttattttggcgtcaggcaaattctggtctcctagaatgagttgggacgtattccctccattccagtttactggaagtttgtgaagagttgatctgaaccactaccatttctcacctgcattactgtaacaatctcttatctgatctctcagcatctacctgtcgcaggttgggaatgaaataggctagtgatcatttcctttattgaactctggataaagtacttctttttttttttgagacagagtctcgctctgtcgcccaggctggagtgctgtggcgcgatctcggctcactgcaggctccacctcccgggttcacgccattctcctgcctcagcctcccgagtagctgggacaacaggcgcctgccaccacacccggctaatttctttctttttttttttttttttttttagtagagacgaggtttcaccgtgttagccaggatggtctcagtctcctgacctcgtgatccacccgcctcggcctcccagagtgttgggattacagtcatgagccaccatgcctggcctggataaagtatttctaaaccctaaaatgtttatgtttggttttgtggctgtggatctaatgaagggacttgcagtcaagtccattttgaggccaggaaggctgcctcattagcacctcattgtgaggcctctgtgtcttcatccacatgtgaggcaggcagaaattgttgcctcacctgtaaagctggatgaagtcaagatagccccttttaaaaacgttacctttagggaagatgttgcttttctgccaagcatttcacatggattatttaatttatatggattaattaatttaatcctcacagtagttaaaaagaaaatggaggcatggataagtttagcaacttgcccagctccacagccaatgagtgggcagtaagacacgctacctctggcaggtattcagatgtgggagcatgctgcagagaggccctaccttactctctagcagactgacttcctgtcacatctccctgttttttctttttttgtattatttcctgaaattgcctttttctgtcttctctgctagaatgcctgagaacatcagttttattatccccctctctgtccccatgtccccagtcccttagaaccattggtaggtgataagcgaatatttgtacactgaattttactggctgtcaacataaaactatttgaatactgaaggtaaaatataaaattgtatcatttattaaaagaaaagtaaatttagagatgtttcagccagtgggagcttctgaatggcaatcccctgacctggggtgccttactgccattctctgctccagaagaacttgaagggacacccccgagaagtaccaggccacagggaggcactttgcatagaaatttgcagtgatgtaattgggatttagataagacatcatctctagggaaaagggttcacccaggatgccttcttgagtcctgatgacatgataggattccggtcactgtgccatgtcttttaactaattatagcaataattacttaattgattgatgtgctatggtctctatcacaatgtgagtaatagtcttagaggtgtcactcccgggtgaggtgtgtatgtaggttgtgggatcctgctcttctttcagttttgtaggtttcagttccaaaattgtggtacatctgaagtcaattggtttccttctgatatcctttctcaccttccctgtgtaggagaactgaagtcagccttaatttgacacaaaatgtttctcacctgtggggttttgaaggttaagagggtgaacttatttaaatgaacaacatatttttttttcttttaggaaaaacgcaaagctgaggaagccctcagtgacctcagacgtcagtatgaaactgaagtaggagatctgcaggtgaccattaaaaagctaagaaaggtaggcatgtggcagctggacttgtaggaacagcctcagcatctcagggtatctaagccattaacaaccaaaaacatttggaatcctattgaagtggcggatagatcagatttcagatttgttttgagactgagtcttgctctgtcacccaggctggagtgcagtggcaagatcttggctcactgcaacctccgcctcctggattcaaatgattctcctgtctcagcctcctgagtagctgggattataggcatgcaccaccatgcccagctaatttttgtgtttttagtagaggcgggtttcaccatgtcggccaggctggtctcaaactcctgacctcaggtgatccacccacttcagcctcccaaagtgttgggattacaggcgtgagccactgtgcccagcctgaaagaccttttaagggcccctgagttcctcttctgtttccaggggccacctgtcttttgcatagatttaataattattttctgatcccttcaaccattgtccataaaacttcagtttgctttccttggtcttcaccagcttagtactctcaagtcccttgtgtctggtagactgcatgcttcatgactgtttttcttggtcatgtcaaatatccccgtgtccctacccctagcttattgcaaagtgcatggtaagtattcagggaatatttattaaatgaaatgaatattgctcttctaagtagaaaattccagatctagggtaccctgatcaccaagagtcactagtttttgaagaagagcagaacttgttgaagtgtgagcaaagatgtgattagtttgtttgtttgtttgtttaatgtggttggtttttggcttttcctctatttggtttctaatgagcaggttgttttactcagtaatactctggcagttgtttaacaggtggctctatagtgggtggaggggaagggagggatgtgtatcatttgttgatttccatggtataaatactcctgtcattactgatttcatgctaccaagttgatgttactgaatttaaggttgagaagagatgcttaaagcagactctcacctgctggtacaggctggctccggcactgtactagacacacttcttggatctgtttttgtttttcccataactaatggggatgtgttagctaaaatgaaaatggataattaaaaaaggatcatccttgctgggcatggtggctcatgtctgtaaacctaatactttggaaagctgaggcaggaggattgcttgtgctcaggaggtcaagaccagcctgggtgacatagttgagatcccaccactgcaaaaataaataaataaataaattttaaaaattaactgcatgtggtagcacatgcctgtagtcccagtgactcaggaggctggggtggaaggatcacttgaagctgggagaggaaggctgcagtgagccatgattatgtcagtatcttaaaaaaaaataaaaaatcatctctgaaagtggtgatgagactaagtggcaattagctatattttgtattttatacactattgcaatttaaacctctgggatgattaagaattctccccagtagcctccttagaaaatgaatatcaatttgaaccttatatctaattttcaaaagttattaggccatgcatactatgcttacattacagaattgaacagacgaatcttctgtttatgctagagccacaaattcactgagtcactgccctgacttatttctgtggcttcccaaatctttaaaggaatgtctacaagaagagatgcagcgactgatgaggcccaagtggtctgaacagtaagaaagcccatgtgtcaggagacctgaatccttgtcaaaactgtacccatttttccctgaagcacctcggatagttcacatcatctttctgatttttagtttctgatctataaaatgcaattattaaaaaactgtctttcctaaccataatgactgacattttattgactttgcagttcactaagctctttttcatgatttaaaaaatcaaattcttaaactttctctgaggaaggtataaatatcctacttttagagatgaggactgagttccagggaggttaactaacttgttcagagtcacacagctaataactgatgaagccatcttactacacagtttgtgctttctcacttattccagacttcctgcatgcctgatgtggttgttatgcaaaacagcaagatgtttatttgagagtgcattaagggctatagtttacaaatttgttacaattgccactaactgtgtccttgattctgagaaactcattttttcccgatggtttttcttctctgaagtcaaaatgcgtgtttaaatcgatggcttttctcagtcagagtcagcctcgtggcagtcatgacgttgttatgtaaacactatccctttatagcatctggcaaggtgaagaaggtccagaatcaaagcacttagacttcgtgaaatgtgggatccattttgatcagtgcataaacattccaataatgaataccaacagatccctaccattcccagaggatgtaagctgtttgtaggaaaggcattttgttgttgttgttgttgttgttgttctccaggttataaatgtgtggaaccaatttagtctggtaattgtaacgagtttgtagttgcaatagaaatgagtcaaccagcaagcaaagctcatgtagaaatgagttaatcatcaagcaaagcttaaatgtaggtatatataatcaagtgtgtttgtgtctctagcttcctgttatactcagattttattgattttagttatttaataagcatttcttaaactcaccatgaagaaaacataggtgaatctgacactaattctgctcttaaaaaatcttgctctgtagcagggaaggtaagacatttctaaataattgtaatacagaatggaaagtgttaaatgcagataatacgaaggagaataaaaagatccagattctaatgtagcataactgaaaaaagcaagaactggattgcttaatagttgaatgatttccaaaaaaggcttttcagctgtttccaaaaaagttcatttcacaacaaaacccctttttcaaatgtttaaattatttagaacaaaatttcaaatccttatggattttatgtagtttaatgatttatgaagttgcataatgttgaaaattggtgacttctagaattctcatatgtatattcaaggatagtcctaaacttaaccaaagcaattcaaagtgagtttgtaagcacacaacttttatttggtctttcagctcgaagaacaatcaaaacgcgtaagtcaaaaggaagatgtggctgcattgaaaaaacaaatttatgatttatcaatggtaagaattaccttttcacttacagaaatgcacttcctgttagaccacatcctcatgctcttatttcagtgttccaggaagagcagcttaaagggaagttaatactgtagttagaaaaagtccttaaaataactttgatcaaagatactatttatgcaggcttttccctcaataatatgccacttattgtgaaagcttttacttatttttcatacaaagtaataaagacctagtgcttacattttatgtaacacagttaaccctgtgttcttccaacatcagctctggtctgtattcctggcttagtgatgaggatattagtgccttgccccttcctccaagttttttttttttctgtcgcttttccatcttacgccagccacatctacttttagtactaacaaaattggtaacatttacatatcttctgttatgagttttatttagtttggttttagattaactctcaaatttgaaagcagataaagagcattttctttcttatgattctaaatattttcactgcagagctaagaaatgagtgaggcttgcatttctttctctccatttattatctctgatccacttagaaggttcccagcttcatggtcaaatgaattcctagttccagatttttccacatcttagtaggctttgtatttggataatgacattcttgtagagttatttgtttttcttggattttctggttgatttttttggtttcttcttgcaaaaagcactaccattttcatgatatcactgataccttaagacttatttagtctttccaatgcatgaaatttgtttagtttttctccttgaaaatattaattttggagtctataaaatttcagttttttttttttttttttttttttttgagatggagtcttgctctgtcaccaggctggactacagtggcacgatcttggctcactgcaacctccatctcctgggttcaagtgattctcctgcctcagcctcccaagtagctggaactatagatgcgcaccaccacgccccgctaaatttttgagttttaatagagacagggtttcaccgtgttggccagggtggtctcaatctcttgacctcatgatcacccgctttggcctcccaaagtgctgggattataggcgtgagccaccgcacctggcaaaatttcagttcttattggactgattgttttttaaacttgccacccatatgttctgcaatttcttttcactaggcctttcactgaattgcagcattttgcatattacaattttttgggaggagagggtttcatcctcatttcggcatagcacatcctcaagaaacttcttcagaaagaacatgtgagagagaaattttctgtttttgaatatttgagaatgtctacattccccctcacaatttattaagtttgtttagataaataggcttttttgggactcctctgtgatttattaatttaattatttctaggtaccattttttttcaactacctggcagttgttggtgatctgttcatattttaaaatgaaggactagcttggtcacttaaggtagctggtgtaggatcctgtgggacggtgtgaacagatatgctcacctgaaggcctttctcccgagagagtgtcttccaaggagctctgtgtgtgaagctggcaggggaccccagttaccggtgtgagtggggcagggatattcagagagaagccttagctttttttacaggagccacttagttttaaaaagataatctctgccttgtcttcagaatccactctggctctctgctgttacttgctagggtaagatagggaatgggcttggtgggaagggtggcttactatacagttttaatctctctttccaaccccatatctggttctgtctttctggggttcggcccggtcacttgtctccttctggattctgtgtcaaaaccttaaacacacttcctctaatcttccatttccccactctgttccctttggcaacacatttccatcagtttccactttctagaagtgcatttaagtcacttgaatgctctgggctgctcttccattcttttaactgttattggttcatttcctttggcatttcattttagtgaggttttggaaggggaaaaagacaaattcatgtgctccatccaccatcttgaacgaatgtctccaatattattttaagaaaatacagaaattttcaaatcacactggtttatttttaagtgtaaaacttaaaatattaagtgatggaatttatttgtaaaaagtagccagtgtacctggtaataggtactgttgattccacaaaatgtttatcaataattttaaagcgctcattaaataaagcaagcattcgaatggttggtgtcagttaatttgccaataatgtgttgaaatacatcatgataaacccttgactgttgtagtttggtgtcaaatatcaagcataaaaaaatgaagaatgactttgagggttttgatttttgacactttattaatttatattgatttcaaattaccttgaattgacaaatagttgtttgaacactgagattttgaagagttgtggaagggtgagagtggtgtgggagggtgacaggacactttacttcatttctcccaggcagaggaaaatctgaatctaatgacccccacttttcattttatccaggaaaaccagaaagttaagaaagaccttttagaagcacagacaaacatagcctttcttcagagtgagttagatgctttgaaaagtgattatgctgatcagagtctgaatactgaaaggtatgaactttgcattttatttgttagtttgagtagaatattgagatgatcatccaggcaaaagaagctcagctatggaataatgaagagttagtaactttgctaatatcttctttactttctaatgattttattttcagtatcaggtttcctagtgttttttatgtttttaattttttaagcaaatagaataattattgtctgttttggctagtgcagggcttaataaatgtttgaattaactgggagctaaaagaatataccacagtgtcaagggttagtacttattaaagtgttttgaagtcaggaatcctggccataaaacataagaaagggaaaagtaggcaagtctattttcgtgtgtgttagttttgcagtatggtgttaataccataaaacctaatacacatacatacattcacagacacgtatttatatataaggaacatagacatgtatatttttatatggatggtaaatataaaatgcatagatatgtgtatatgtgtgtatcccctaggacatgtacacttgggaaaaatatctttttttgggtttgtttgcaaactttaatcagaattaaggtcttacaagagaaaacagtgaaatattatcgtttactacatacaagtctctgaactagataaggagttatgagtggagagtatatatatatttataatctcaaaacacagagcccacgtcatatatatatatatatatatatatatatatatatatatatatatgatgagaacttcaaatttagttgggaaaaaaagcaaaaagattatagggtttaacaacagaagagctaaaaaatatcagaagtagtgccactaacgtagtcatggtttgggttaattgctgtgtgatcacagaaaaggttttgttttagttcagaagaggtgaagaactgtattgaagaggtgatgctggaggtgagcctaggtagaaagatagctctgtgctgggaaaggggagagaggcagccaggatggcaacatcagcaactcagagctggtggcactgctgcctgccaggcactgtcctggtccttcgcaagcattaactgatccagtccacagaacatctggtgagacagggaccttcattatgtccattttacagatgggaaaagagagtctcagagatgttccaggtaaggcagtaaccaaagcagggaccagaacatagggaaggatacggcttggggaaaggtggtcagaccacagggcagaaagagacattttgaatagaaaagcaaaagtttaaaaaaaaaattaaaaagtttaaaagctagtttaaggttatcatagaaggcccccgaattttggtttaaggaacttaaattcctatagacaattaggaaatgtgtacttttatcatccagggagcagatggacaggttattgtgaaccaaacttgatagcctgggcattttgggaagctagtgatgaggtttgtatgctcaggggaataggggctggaggagagggccagtgttctgagcagtttggggaagaagccagagcttccatcataaagcaacagagggattgccacagaatgagtgtctcacgagcttagcaagcctggttctttggggatctctgtggtttaggtaaggagaggagggagagcaggagtagtgtgagatggaaagaggaaggaatcacaggaaaggagaaaatagatggagttgggattatataaggctttagatgagcagggaaggttcagaggattgaaggcacagtttctgagacacccttagaagagactcaggaggttcagccctcgtggagaacagagctgggtcagcgagcatggggatggaagagctggtggttgctgagatgggctgaggaggagaagctctaggcttgtgatgtcggaggcggggcagagactcacaggagaaagcacaggatgtgagtgtgtttgtggagtcgcagaaggagaggaggctgctgaggccacagaggcccagagcaggagcacgggaaagatagaaaactgtggccaaggacactcgtctttgaaaaaggtgggaaagggtctgggagggtaggtatacgtgaggcaggacttgacacctaattctcactcaaacataaaatacaattttacagggatctggaaataatccgagcatacacagaagatcgaaatagtcttgagaggcaaattgaaatactccagtaagtccgcagatcaaatgctcattacatttacatttcacttgttttttagttaataaaagacataacacatagaacgtgagttgccatgttctgaacactgggtttgcaggtcagtgggtgtttcttctcagggtgtgcacttggcatctcctcttagctttctgatgcttataatcctaaataaattattcagatgtgggaatagagtataaatctctaaacatcttgggaagtcaggggatatgtccagtgtgtctttattatgcctctataaagaaaaatggccctgagcactcagctttctctgagttctgtaccgtgagtttttttttttttttttgagacagagtcttgccctgtcacccaggctgaagtgcagtggtgcaatctcggctcactgcaagctctgcttcctgggttcatgccattcttctgcctcagcctcctgagtagctgggactacaggcacccgccaccaggcccagctaatttttgtatttttttagtagagacggcattttaccttgttagccaggatggtctcgatctcctgactttgtgatcctcccgcctcggcctcccaaagtgctgggatgacaggcatgagccaccacgcccggcccgtaccctgagtttttgaggcttctcttgttagtggggccacagggttctgcctccacaattctttctcagtttgttttgtttacttagaagtatatttttcttaggtttttttccctctccccaagtagaaatatacccactctgtcagctttatgactaggttatagcagttccatcctctgaaggtcttccccacaaaacctacccctctccttcccctttcttttctacccatgctgcattgtcttctggtttcagttcccctcaatgaagtcaggtcaggtttgacctttttttttttcaccatttttgaatgcttattaagtctcacctgtggcagttgtagagttcatgtatttcagtaatccttcaagttattttatttattcattcattcaacagatttgtcagcacctcttacaggccaggtatgccaggagcaaaggatagagtgggaagtgggtgaaaaatctctttccccttatggggctagtttaggggaagaagacagaaatggatcaataatcatagaaataaatataaaaggccaaacaagagagatgcagcaaaagaaaggtacatgtcccctaaggggagcattggcctatcaaagaaggtcaaggaagtgttctggaggaagtgaggattgagctaagatgcgaagggtgaaccagccttaagctggggaaggttagccactctgtggtgtaggagctgtggaatcatagctttgctgtacaagagggcgctgaagctctgacagcttgaatgacttctgttaagtcatatggaaataagagttaggatttgaacccagacctgactgagatcatcacccaagtgtttacctgctacacgacggtacctggtggaacagtgccaggctgtgcatagaatgcaggagctgccaggagcatgaagcctgatataacacactgcgttcatccctgacctctgaaatgtggtaactggctggccaggttcaggcatttagggagctttgaaagacctgcatgaaatctgttcaatcagcggggctaccttaaggaagagtgagttccacagcatagacagttgattcctgcaaggccctgagacctttaaagagagaggagtaatcaatttagttcttgtactttaagtaatgaattatctcagtttttgaggtttgaagggaagtggtggaaagttgcagaagatgataagctattccacattctgaatgttacagctagaaaagaaagtgatgacagtgacccccaatgatactttccttgtctctctttctgcttgtttctttaccctgcagaacagctaaccggaagctacatgacagtaatgatggccttagaagtgcccttgaaaacagttatagcaagttcaacagatctttggtatgccacatagttttaccatgtatttcattctttctagtggtggagtattttggtgttgatgaaaataatgtaatttcttaaaggagagcctcaagtaagtccttataataatgagaagatctttccataaaataaaacgaggcagcatttttccaaattaaaaaatatgctactcctctgaagaaataagtgtctcaatgttaaccaactctttttatagatgttctaggaatctagagataggtgtgtaagatgggatctttggcctgaaagagtttagacttgtgagtattctttatgccagtgagatgctcagaatgggagccttggatttcaaaccctcctacagaaatcagcttagctcatttggaactttaaggacctctcccagactgcatttgtcataagacctcttatcccacttttggaagtcagcttcatgtgtaagattccagggtcgtattgggatatggaggagtcagtcactaagccaaattatggttcaagaagagacacattcaaggaagttgagttgcaggatcctggcaaagtggggaaccatagtactcctttatggaatatgcagtagggtttggacgtaagataggatgaggaggagagcgtactatggcagtcatcttcgttgcaatgtttcccttgattttttgctcacatttgctcaggtagtgtaacaaacttttagttacattagaagtttgagtagtgtgctacagttttaaaaaatgggtttgtgtgtacctatgtgtatataaaatgtttacatgaaaattacatgaactaacaaatgattacttctatattacagcatataaataatatctcaccagggaatacaatttctagaagcagtcccaaattcattggtcattcccctcaacctctaggctatgacaggtatgttaactcgtcttaactttctgttcaagttcagaatcacagttaaaaggaaagtaaatttccttggaggtggattaaaataatagaatatactttggtcactaatttatattttctatgatgttaaaagttctgaaacatgaatcatgtaaaaattaaaagtgtttcagagagggcaaagttatttcctgaagatgttatgagttagttttatatatgctcatcattacctcatctctaatcatgtcttgtttcttagaagcagactcaataagagatgtttcagggaaaccagcagaattatagtatatgatgctgcagtgtttctggtatataatgttgaaactattggcatgatctgtaaatatttaatagctcagcataatattatatgagctatgttgcagaaaagggaaactctcaaagcaaatataaatatcactagtagatccttgtaaaatagctactgtattgaaggagtcacagaggcttgccaaaagttagaatttagccttgtgtttaatcaaatgaactgaaatattaggccttttattacttgagacctagtaatcacttagagattacatgagtgtatgtgtatgtttatacacatatgtccagtgttgctagttaatttagtaatatgtcaaaaatttgaaattagaagtgaaagcataaacaaaaagtttccgactctctatttctttgtgactttcagattcacgttcatccccttttcatttgggtacttttgataaaaagaataatgtacttaacatcctggtgttagaaatggtcaggttgccatttaggaagacctgttacgaaggcttattggtgatcatttctaagaaaattgtatcaggtttaagtggtttctactgttcactgattagctcaataaaaaaatttaatggcttgatttatagatggctgactattctgttattgagaaataatcgatttttaaaaatgtgtaggtgtgatgtcatttttgactaatatttaaaactgattctaagcaaattggggggaaaggtatacaactgaaaagtatttcagaaatttcaccatgattcattttggaaagattagacaccatgaaagcctcataagaactggagtagagctcatcaacgaaagattctaggggacaaagtcatcacgtccccagcatgtttgagtgacgtagcactcatgtgcctacctccttgagctgtaatgagaggccaccgtagcctcaacaccatgccccttctgggtgtgtgtgggggggtgattattttgacataagaagataacattttattttctttttgatgctaatataaaaatgtaataaaagcatgttgtacatcagattagatgtacaataaaattgtattgtttttatagctttatttggttttaactttaaaatttattttggctttgttcttcgcaagaactctaacaaagatttaatttgttttgtacttttacatagttaattataatgaaattattgagtgttggcaagatggttgactttgaaaaggatatgcagttcaattgagtttgagaaagtttgacctgtacctatgtttttatttttacttttaaaaattttcaacttttatttaagattcagggggtacatgcacagatttgttacatgagtatattgcataatgctgagtgtgcctatattttcaatttagagtctagatgtttattcaggtgaattcttaattcagaacttgatgttttctttgctccttgtcaaaatacaagtaggcttaaaataaatcataaccagtaatgaagacatggaactgaagtagtttgtagtatattataattagaatggttttcttatgtgctttatagatggacctaaaatcagtttcagaaggagagttttataaataatgcaataatatattggcaatatattttcattgttattgttattaatagtatatattaacaataaataaatattaaaatatattaacaatatattttattgttattgttattaacagtatattaacacacacacgcacacatgcacacacgtagctagctatatagattgagttatgatataaaattcttggctcagaataaagactttgtaattgagcagtattgagagagagaaagttagttacatcatctttttaattaattttaaacatttgctaatggcataaaaatacttttgacttctcagatttacatggctcacacttaattatattaagcttaccttctctcatctaagcatatccacttcttgtttctcatatctgaagacctatgtatcgtgcccattctccctttccaatgattcgtgtaagcaaattggtagggtggtgcccagggtgtagtgggtggtaaataagtcataaccataattggtaaacttagattcttatggaaatcaaatggaaaagctaaagtaaacaggaatgtatacagtttcttatgattctcttatttgatgtgaatttctccctcacttataaaatcttcagagtttcactaatggtaagatctatagaagtcaggagttccagcctttatctgaggcacctccctccctatgaaacgtctcccagaggggtgtttccagacggtgtgtcaacatttagtggcagaaaacttacgtgtcaaatcatacattccagtcatgtttctaattgcttatttttatcagatgtttctaattgcctatcattttttgccatgttgattagaaatatgacacccagaaaagcttatcttattttgtcttgtgcaacctgagaggatgtggtcttcttcatgtatcagctcttcaagtatttgaagagagaaaccattaagagttaagttgagtacactgaatcttatttttcagctctgagggtcttgagtctgacattgtggttgccttttctgtttgggctctcagcagcccttttaagtagagatgttatccagaaatggacacaatgttcagaatatggtctgaccaccttagagtaaaaaagctcatatattctgcatacatttttatgaatacaacttgcgattgtgtttatgtcttaggtactctaattctttttgtatcaggaaataaagaacattatttttttaatggctttgtttgttaagtgtttgatgtaaggttctttatcttaactgattgctgcatagaatgaactgatggtgctttgagcattttatttcccctaatgcctaatcatgaaataacactgcggctcttagccacagtcggcctacttgattccatctaatggcatgtggtctattgcctgtatgttcttgagcatttccagccctcaggtaaattggtcttcccctttattaccaggtcatcccgctcttcctatgtggatgaggactgtgactccctggccctctgtgatcctctgcagaggacaaattgtgaagttgacagcctgcctgaaagctgcttcgacagcggcttgtctaccttgagagatcccaatgagtatgactcagaagtggaatacaagcaccagaggggatttcagaggtcacacggggtgcaggagagctttggaggtgatgcttcagacacagatgtaagccccagaaaccactgctctcctaggccttctacgtgattgaaatctgtcaccttatttgccttctatctgtcatggaaatctgttttaaaggtcatagatgtaaagcatagttagtaaaatgctttttcctccacagagttagggagaaattctcatagattgccattcagtgtcactctattccctaatattaatagcattgactgttgatttagctgcatagttttcttctttttaatccataatgtatacattttagactttgtattttaactgctgacattttttaatttaactgctgacattttaaaaaaaataggttcctgacataagggatgaagagacatttggtttagaagatgtggcttccgtcttagactggaagccccaagggtctgttagtgaaggcagcattgttagttcatcaagaaagcccatctcagcactctcgccccaggtaggtggtctccgagacactcctattcatgaacactgcttattttctgtgcagtgttacttattaggatgaaaactggcaataccgttatcattcactgtggcttttccccccagacagacctggtagatgacaacgctaaatcttttagctcacagaaggcttacaagattgtacttgctggggacgctgcagtggggaagtctagtttcctcatgagactttgcaagaatgaatttcgagaaaatataagcgccaccctgggtatggctcgtatttcggttgataatgggaaaatgaccttccttagcttgattttctcttcttcagggattacatacacagatgctcagttaacagttttctctttctctgtgtatgcacacatatataaatgtgtgtgtgtgtgtgtgtgtgtgtgtgtgtgtgtgtgtgtgtgtgtgtgtgtctcctagtctatggaaaggtctttcttgttttggccaaggcctgcttttaggaaaggaagattaaaatgacagagatatctggctgggtgcggtggttcatgcctgtaatcccagcactttgggaggccgagccaggcagatcacttgaggtcaggagttcaagaccagcctggccaacatggcgaaaccccatctctaccaaaaatacaaaaattagttgggcatgctggtgggtgctggttgtcccagcaactcgggaggctgaggctggagagtcgcttgaacctgggaggcggaggttgcagtgagccgagatcacaccactgcacttcagcctgggtgatagagtgagaccctgccacaaaaaaaaaaaaagagagatatctgcttagccaatcagatgaattgaatcaaatttagatcctgagatatcagattcatttattcagcatgtatttcctgagtcccactaaaaacaagatgctgttgtaggtacaaacgatacaccatgaagaaggctgacaatcccagcctgcactgcacttacatcccagtggagggaaaaggtacaaaaaagaagtttagggagaggtgcggttttacgcagggtggccaggaaaaccctttctgctgaagtatttgatgttgacaaagtgacaatatggattgccactttgtcattatggtcaaaatcatagccagatatatgatccgttacccaccttcacaacagaacaatagaacaagtagtatcctgatttcccaaatttgcataatagtaaaaggagttgaagatatgcaaattatcatttatttttcttcttcgtctaaagagttcttattttgatcacccgaaatgttagaacagactgattgtcctcttcacatgagtgtctttgtaaatttatggttctctgatacactcttcaacattaacaaagctgaaagtttacttcaatttgattcataaaaagactacatacagtatttggttcagttgtcagagaccatgatgcatgtaaatgtgtgtgtgcactaacgtgtgtatatatacacacgcatatgtatacatgtttagatatacatacatttatacatatatacctacatatacatatacatacatgcatatacacaaaacacgtatctgcacctacacacatacatacacacacgtatacacctgcacattcatgcatgcccactcatacacacatgtacacacacccacacacacacacacacaaatatgactgagttcatccagtcatcagggaaaataaaacagatttttcccttggctcataaattaaatcattccccaagtcagccaacctgcagatggtgcctctgcacacacgtgtggtctgacttgtcattcctatttgaaggtcactctccttaaaggtcatgttcattcctccctccctggctgagctgtgtattattggcttttgcttcatctaaagaaggcttgaaagtaaaaagccaatggaattatttacatcgtgctctccactctcacattccttttcaggagttgatttccaaatgaaaaccctcattgtggatggagaacgaacagttctgcagctctgggatacagctggtcaggagaggcaagtgcattccgcagcgctatgggatatcctgggtttgcattaacaagccttgcaggccacttgatgttcttcatactcaaaattctataattataacatactttataattatatgcataattacatgtataattataaaatgtattataactttaaaatgcttatattctcgcacatctccttcatttacctatgactcctgtgagaagaggatctttaagcttcttttgagctgatgttcagttgagacagagagtgccctttgctaacatgagaggcagcatttttgagtgcagtgacagcctgaggaactccctggctatagaacaataaatgatggagaagagaaccagtcagctccccttgattaagggcagaggcacaaaccgcatagcagacttgcatttggtgatggcactttaccttgcattcattaccgataagcagagcattaagcacagattttaatcttgtttaactccttcggaacaaaatccattcaattgttcaacccgtaagtatggggtgcctgcctctgtaccaggcattattcagcatgctgagattcagtggtgaacagacaggcacaaatacctgcccccatggtgctcatattctctagcagattgggaatttcaacatataaaaaatatttgtggttgacatgactgtatttaaaatacttataaaatattgcactgggtttcaagttagggcatgtgtgttgaggtgttctcttcccaaggtgaatctcctgacccccatgtatgtaaagtcctggtatgttacagcgttccacactggtagttcctccatccacccacaatactccctaaccaccaccaccaccaaaaataagtattctctagttcgtatctccttccagcctcctctgtgtcccacatgtgggttctggtagcttgttgctgaggttgaaatttttggaaactgtgctctcaacctttccctggttgtgctctggggattgtagacattcttggggttgtttggtagagagaaggattggattttctaagtcggtcacccagattctcatcatgttacctttcattgggtcattcgagacctttgaaatgcctatgtctcagtcatatattgcagttagagtcttctcaactggtgttgattttagaagaggagaaaaaaatgagcataaaagagaagaagaatgaggcaacacaaactgactgatgatgtggttttctctttctcagattcagaagtattgccaagtcttacttcagaaaggcagatggtgttttgctgctgtatgatgttacatgtgagaaaagctttcttaacatacgagaatgggtagatatgattgaggtaagaaatcataatggagaaacagaaaattacacgaggaagttttaggccatcttggaaaatgctgtctctcttctttgtcagaatgaacttgattaggaaccattgatccaagccatcaggaagaattggatgctacaggcagaactggcagcattcatctcttcctcaggatttgggcacatttccctgaagccaaggacactaatgaagggagctttggggaataaaacttctaggttttcttatagataaaatcagaatcccatcgtaagcaagtaaaaatccaggtagcctaggaagaagttattacaaacaaggagatggtgtggttggttgtgtagtgtagttgggggcatgtgggggcatccacgggcatgggaagtacaggtgaaacaccacctggatatgagcgtgcgtcaagtttcaaattgtatgggagctctcttctcttctcaaccttattctggtagtgatttgggatctttagatgtctcaaggtactaccgaaataccagttgatattttaaacatgggcatagcttctgtgctttctgtggttaaataagatgatgtctttcacctaaggaacattcctgtcctctggtttcatggtaaataatttttaaaagtaaatgattttgaccccatttagcatgctgccaacagttactaacataacactacagttccagctatggttcagcatgctctcttgaaaaataaacttttcaactaagtatattaatacaacttttcaactaagtatattacctgtaatttaagaaggcattaaattgcagtagtggctgaacagaggactggttgctgtctgatctcaatttagcttctggcattattgttctctttctaactaaagaagtagtgtgagaaatgactgattgcaattggcagtaagactttgacagtgataaataaatatgcactctgttctaccaacttatcatggcttaaaatgattgtaaacacagtgaaagtgtgtttacatttatgtaacatttttacttcacaaaatttcccatgttatagtcatctctctagcatctgagaaatgaaataagaaaacatattatcctaagtttttatgagaaacttgaggcatagaaagcataggtagctcttgcttagagttatttagtggttaggaatagaataggggctcaaaccgaacctcctgattgaacagtggttgctgttttgatatagcaccagtgtgagcagaagattacttgaagaagcctctgatatcaagaaggaatcccaaggactataattccagcactttgggtagtcaaggcaggcagatggtttgagccgaggagtttgagatcagtctgggcaacatagtgagaccccatctgtacaaaaaatacaaaaattacccaggcatgttagtatggacctctagtcccagctgcttgggaggctgaggtgggaggatcacctgagccctaggaggtcgaggctgaagtaagccgtgattgtgctactgcactccagcctgagtgacagagcgagacccccatctcaaataaaaaggaatcccaaggtataattagtgcatagaggagcaatggctactcaagtgaacaaatggagatccctgggatggagcaataagtccagagaataacagataaccctaactcatccatactagtgtttaaaatccacagcaaaactgttttattgttgacattttggattagtctttatttaaaatctttgggttatgctcaagaaaaggaggcacaaaaggcaagatcagccacagtgaaataacccttatgtagagtggcccactgccataatttgcaaagcaacttcacacgttgtcatcttttccgccattggtatcacgttttcctatggtctgaaaaggaagaaaactatagaagagatgaattcttaagtttgttatggatgaaaaattacatactactaatggcatttgactttcaccttagaaaaagaatgagcacagtgaagtttctccatggcttactgtttctaatttgaggaactcctacagggacagtttatatggccactgtaaatatgggcggaaatgaatggtgtgatcattggggtaagccagaggattgagaagctgtagactgtcagcggtgaacagaccctctgaattaataattgatatacttcaatggaaaactgctgagttaaaaaatcttgtaatagaattatggataaagtaaaattatagccatttgtttatctgtcatgaatattttattgatcgaatatttgggtaaaagctgaatggagatacttgagatgtaatatctcttcccagttttaacacattcaaaactattttttgaggatctgcccggttcctgtgtagtagtctaggttctcgggatatatctgttaagaaaacagagccctgtccttatggagcttgtgttccagtgggggagacagatgaaaagcagcaaacatagatcaataaatgaaatgatatggtagaaggtgataatgttatacaaacaaaacgagagcaggttaaaaggcctgacgataaggaagtgggctgtggttttcttcaaggtagcctcactgggaaggacatatttaagtcaagacttgaaggaggtgccctttacctctgtggctttgagaagtcatttagatgcctggattcttgggcttactgaaatgaatatttgactaataactttcaagtgatgccccttgcatcctgaggtcatcaaagaacacaattaacgagcgcattaatgagcgaaacagctaattttggagagggccattcattccctttcctttgattttattacactctggagccttcagtccaaggaaagttgcctgaagagaaaggaagtcaatgatgatttcatgttgaggcacgttttttgatcctgtatcaggaatagccccaaacccaatgagtacgcaggtatctttagtcactgcaaagagtaatttccacatgttttcatcagggctgccacttctcttatttaggaaccagaaacttgtgtttctgtgctagtcaggttgtcttcttgtattctcatcatagcctgctgaggtgggaaatgccttcattcagtccttcattttacagacaaggagactggagcggaaagctgcagagacttgcctgacctcacacagccagtgggtccagctggtggagggctgggtctcagacttgcctctgccacactcatctcacattctgtgagcttcactgtgactgtgggaccctgtgacaattgcataggctgacatgggaggcttatcttagaatccattactttgaaagattggtacttgactctttcttagaaaaatgttgaccttcaggacttttatattttgcttttgttgtaaaccagagagcagtgagtgtggaacttccaaactccctttttgtttcattatagttgaaaaattactgtgtgttttataactgtaataatgaacttggcttgtgatcactattgtttaaaataacagttgtagaaaattatgtgggcagcacagccaaatatgattctgtggtcatgccttttgagtttatattggcttgtagtgctctgtgtgctggagataagaaattaacagatatgtgtttcctttgccataaaactgattaatcccagtgccttttagtcttttcattaacctaaggatggggcattatatagaggcaagcgttatggagttagtttggatccaggccctgacccttataccttcttatttaacctctctgaatttcagttttctcttctgtgaatgggaaaatgtatggctgtttttagagatactttgaggtttaaagatatcctctatataggatttggcacaaaggaggcaaagggaaaatggtaattgctgttgctgttgttctgtggtcatcgtaatgtgtccagtgtttgatgtgtgccccattttttttttcttcctggtaggatgcagcccatgagactgttcccattatgctggtaggaaacaaggctgacattcgtgacactgctgctacagagggacaaaaatgtgtcccagggcactttggagagaaactggccatggtaagagtgaggatgcctcagaattagaagagaacatggggtttaatggctttgaagtcggtggcctttcacttttgtctacctttgcttgagaggtcctttgacaaacctcccccgtctgaggcatctgtccttaacacaggcaaaactgccatgactcccacctcttttatgccaaggattaagtcccttgggaaaataaaacaatcacataatcattttctcccattgagtatcattgacagaaaggaacccaaataatcccatcatcttcctcctccctctcacctagttcctagaaaccttctctagtcctggaatccaagtaaaggaagaaaatagtgtcctattttgaaaagatggctttggtttcagagggttataatgccaaaggcagaagaaggtacagtgtctcacctgtgtggaagggaattggatgacttcttttcttctctaagatttgtgtttagttgatataaaaaatcattcccatatacaaatgcatatgcattttggggtatgcatttgtatataggaataaactcattcctattcagattgttgtcatgggcagtgtttattctcccatcagtgtcatctgtcatcatgtcagaatgctacctagctctgttatgacctgtcttacccatacaagtagtcagatgcactttgggtcaaataaattaatattgcagcagtctgatttgatgttgatagtgttgtctgtcgtcagcaccaggaaaggactactctgtagcatacgtatgtgaacttcaaaaagaagtttcagttttaatattttaagctggaataatcgttcttgttttaaaatttagaactgcaaaccaaatgtgataaatgtcaaaactaggcaatgaaatgcagaagagattcactcaacccatatttattggtatccaccatgtaacaaacacttcattgtgtgctgggccaagagcagagaacaaagcaaacagtccttgccctcgtattgtttactgtctgagggagacagatgttaaactcatgaaatccacatgctagacatggtctcacacagatactttgaaatctagttattcttggctgcctgccagctttattccctctccatgatttcgcagagttcccaaagtttgcttccttatgcatctcttgacctccacagtcctgcatcctcaaaggcagtctctgtttcaccccatatcatcctggatgtagaagtcaacaccagcactgatggtttctaccagaaatgcatttactttgtggtgtttgcagattttctatggatttgtgggcttacgagtaaaggtcccattgtggcatttttccccatttcctggcttttctcattctccctgttctagagcaagtgtcacctccttcccttgtcccacacaggactgtttaacccacacctaggcccacaacacttagttctcctttattaagagaaaatgtctccagctagtcagacaggcacacaaaaataacttgagcaattataattgtggcaattgctgtgcatgaggatcgcagagtgctatgaaagtttatgatgggaagtcctaatacaaacttttcagggttaggaatgactgaatcttaactgcaaggaaggattacctaaaaatcccaaaagtaggtaggtgtcagactggtggagggtggagggaacctaggtgatgagaagagtaggtgcaaaggtcccaaggtgggaaggctttgcggacactggagaattagaggaaggccagggaaactgcagctctgtgagtgagtgggggatgagtgaggtgggaggtgaagctcagagcttgcctggggccacgtgaagctgggcctcattggccatggaaaagcattttcacattacctaaagacaaacaggaggcattgaaaggtttgaagcaggagagtgacatgatatcatatgcactatggctgggaggttgaataatagagaactagaacgtgtccattggtttcagcaaacgtggaggctgctggatccagaagggaaaagttagcgggaaggagggtgtgttagctgctggccaaagggaaacagactcttgatggacatttaattcctgagtggttaccttgaactcatttttatctgtctcggaatatttgataaagaacatttggtagcatgtgttttgactgttggaaataaaaaccttcaaacatgaaatattctatttttttaatgtaaagtaaaagtcctccaactaggaacttttcctggagtaactatgcttaaaccattttctttgtaagtactggaactctgaattcagtttcttagctattagttactcttagcatgctcagtaggaacatatttttattttactgattttaaaagctaaaatttcaggaaactcaatgaagggcttcatttaattgtgtgtatttcttttttacagacgtatggggcattattctgtgaaacaagtgccaaagatggttctaacatagtggaggctgttctgcaccttgctcggtaaagtttgggaaaatggatgtaggattgaattttcgcttgttgcatatgacacatttcttgtccataatgtgcagatagaatatatgcgggaaaacactctcttatctgtcagtcatggtgggagaaataaatatgtggatattataaaaactggcaacgttgctgtcaacactggcaaaatatctttactaccaaacaaaagaggtgcatctgaggtgtcattgacatttctgaaaaatgtcaccacaaagctaatagttgacgtgtatgaatcatttccaggaagcagattttatacacaagggactattatgaatacaactgtctattatgatattttcccgggcaaaaggggaaaaagaaacaaagcaatttgtatgttatgccagttagaaacactttgtcagaattattacccaggtaattattaagctaaggcaatagtgttaataataaataacattttggatgtacaatagaatgaaaatggcatcattaaagaacttggatataaatgtatgtgttttaatccttgaagtaattcttaggaaataacattctacattagatttttccctcctacctggttttctgctataaatgaaaagattattctttactggcctagagggattaaatatcacaaaaaggaaaaaaatcaaaatgtgcaatacaaatttcagagcaatcatctttaattgcagacaaagttaaaatataactttaggcatgtcattctttttctgattatttgtaaggttttataagaatcttaattttagtatgataattggccttttctgctagtaaatattgatagttaaaatactttgcaatatctttaatgctgtttttcaattaatgacttagggccgggtgcagtggcccacacctttaattccagcagatcccattggtttcagcaacatggaggctgctggatccaggaaggaaaagttagcaggaaggaggatgtgttagttgctggccaagaggaaacagattcttgatggacattaattcctgagtgattatttttatcatttttatgagaggcaaggctggaggatcacttgaacccaggagtttgaaactagcctgggcaacatagtgagaccttgtatctatttaaaaaaagatatacacacacacacacacgcacacatgcacacatacatatacatatatacattaatgacttggcatttatagtgcttaataaattagagttctattaatagaatgtttggactagggctacaggataaactgttgccctcacttaagagaatcaggaaatggactttgggagtcctgcttggcattagtttgtggcagggttggcagatgccctgtattcacactcaagagtcttcgaacatttccctctttgacatcagtccaggagagagagtcacctccccctacaacactggaaatcatttttgtttaaagcaaaaacagtgctaaccttgaatgtgacctagcacattttttccttttgcattaggctgttttgtgcatctctataaaggaatacccgagactgcaatttataaagaaaataggttcaattggctcatggttctgcagtctttacaggaaacttagcactggcatctgcttggcctctggtgagatctcagggagcgtttactcctggtggaaggtgacggggagccagcgtgtcacatgacgagggagcaaggagaggggaggggctactctcttttaaacaaccagatctcctgtgaactcagagcgagaactcactcatcaccaagggatggagctatgccattcatgagagagccacccgcttgattcaatacctcccacgaggccccacctctaacaccgaaggtcagatttccacatgagatttggaggggacaaacatccaaaccatttcatcttttaaaagaaaaaaaaagtgaatatttgaacacatatacattcaactaaattagatgggttattttgtgtgtttttttgtatgtttgtttgtttttggctgtgaatagtaggagaatcatggactaatatcacatttgtgcaaaaagagtcagagtaaaacttttatctgtcgggttgaataacagattccacgcacttatgggtgcacagggaacaccagctattttggctcaacaagctacattcagtaaagaggggagagttcagtaaaatgcagaatttgacttcactaaagatcaaataactgttggattgtcaggtttttacttttcaaatggttgtgttggtgtttcattcataagttgctgggaacagctggatggaagtgatatagttgctggcacagatggcagtggggaaggatctgcaggtctttggagcatccctggtatgccttagccttggtcagcggaacactgcattgctgctcccatgcagcagtaacagatgcagcagatcaagccttgcatgtggttactagctgctccccagcatattggaggattatggtgtcaggaggctcaaagtccattcttaaatctgtttctaaatagctatgaggtcttgaacaagtccctgtatttcttttggcaactctaatctgtaaaatgagggaggggcctaaaggaaatgatctcaaaggtcctttctaattctaagagcctgtgactctgtatatgacagtctgtactccactgaatatcttaatcattgtttaatgctcagttgtcttatggggtcatattaaagttatatggctccaaagtgccccggtgaagagtcgattctctttattatgtcataaagatgggagaggctgtaagtttcctgtgcctttctccccatctgctcctgtgtggcatgttgggtcagccacgtgttggccctgcttacaatgaagcttcgacactagcttgtgtgtgtttacttaaaacacctggtttgcaaaagaattttgataactaggttatttcagctgcataatggataggttatagttattttaaaaagctttagacaagtaaagaaataagataagcttcttgcgaatcatttatcatagaggtttttgttttattgttattgcattatggcctggctttgggcttctagtgatgttagtgatgtgttaaatataaaaattataaataaagcaaacatatgaagaccttaattgctttatacttagccttcggattggcttttcaaagtactcaacccttaaatggaaatgttatagtctccacaggtaaaattaccatttgttgaagttttacaaccttgggaaatttatgtataatgcaaaacatatatgttctcaatttagatttcatagggtgagatcatataatgtcataaaactaggagaaggtatgggtttgcactgtctcaaacaatttatttttaaagggaggccataaatatttggttaacaacctgaactactctgcattttcttagaaaatctttcaatcccaggaagagtttctcctaggaatgcaatttctatatagtgctgataggtcatcgttcataaccattgtcccattagtaagtaaattttccatcaccagaaccacaggctttaaacattttgcagtagattcaagttcaagaggcatttaattatcaactgcctgaaattggagaaaaacacaaaaaacttaggctgatgtatcagttcagcatcagagctgagcccattgggtgtaaatctgtccataagactgagtcaattaaactgcagttgttaagcgtatggtagattttggtgagccctaattttcccagccttaaatctgttttagatgtttggaattgtatctttataatttccttaaagtggagcatgcctgcatttttggctgaaggccagatgaaaatgtgggtatatactttcccccttaatatttgctttcaggttcaataatgtctgcattattggcacttaacacgtgcatagccccatgctatgttcaatagagacatcaagggatttaaagactggccttgtaatttaacattacagaaaagaacatgacaatatatgaccaggcagccatatggtacgtagctgatagaggccattggatctacaagaagagagagatgtgaattgttcagtgaagatgctatggttattgtacccattttacagaagaggaaattggaaattagaatacttaatctgcttgctcagtgacacagctagtaagtggcaatgtgaggactcttcaccaccaacctggatcactggcttgctgtttaaatgttggtaatctcagggtctctgactgtcctctctttcttttcactctctgtctgtctaatgtcttccatccacacagcttctggaaccatctctacctggtaacttccagtttttgtatttttaacccctcacgtctttttaaaattccataagcatagagtgaacccccaccggaaacgccatagccatggtgactctgcatatccaaatcctggtgtgttcatgtggctttaagcttgttcctcagtctgtattccctttctctggaatctaccaaaattataattaaacaatagtcacctggagtcagtcttgattccttttctctcttgcttcaccccttgcctccagtggcttctgaaggtcatctttcagtctcttttgaatccatgcatttttctcgctttctccctttttctgctttggttcaggcctcaaaattccctacctgggctagtgcaagaatttctgcctcagggtttctccaatatcagttcatcctctactgtggaatcaggtaatctttataaataaagatccagttaatatttactttcttgcgtccaaccccacattggtgtcttactgaaaacacagagtcccagctccttagcatgtggctgatagcccatcacagcctgatatggtttggctgtgtccccacccaaatctcaacttgaattgtatctctcagaattcccatgtgttgtgggaaggaccccgggggaggtaattgagtcatgggggccgatctttcctctgctattctcgtgatagtgaataagtctcacgagatctgatgggattatcagcggtttccacttttgcttctctctcgtttttctcttgctgccaccatgtaagaagtgtcttttgcctccccccatgattctgaggcctccccagctacgtggaactctaagtccaattaaacctcttttcgttcccacttttgagtgtttttatcagcagcgtgaaaacgaactaatacacagcctgacctttctggttgaatttctatctctttttcccaaatgaatgataatctgtagacacagcaaacttcatccaatcaggccaagctcttatgcctctgcctttctgcatgctgttccctgcatctggaatctccttttctgttctttcaaaaggtctctccaatgtcaaaagtctctatgaagccccatttccgtgaagcccacaacacatctgtgggcacagagtgcatctgtggtagctgctgtctcaggaccatgaaattatttatttagacatctgactctcccttaaagctcagtagctgaaggtcccagagcctggcataagttgggcatttattcaatgacagaacgaccaagattttgcatttggaagttgtgttactcttccgttgtccttgtaatgaactcccacagatgtagaggcttaaataatgcaaatttattatctgacaattttggaggtcagaaacctgaaatgagtcttcccgggtgttagggtttgaattgtgtctcctctttcttctcctgagtctctgttgcctcatctgtgaggtgaggatagtactactcacccatctcctgtcgggtgtgtgtgtctggggtatatatcaaatatgaaaaacatgtatattgcatttaccagctgtcctatagctagaatcagtttatttttttccctgctgagatgtcttctttccaattcacagtgcagtggatttcgaaaggtaggatttatcagcaccttctgcagctaagctggccagtttggtagccactagccactcacaatgtggctaatccagttcagatgtgctgtatgcattcaatatagactggattttgaaggccttctacacattatctcattaatagtgtttttattgaccacatgccgaaatgacaatatttttgctatactgggctaaataaaatatattaataaaattaattttacctatttctttttaccttttaaaaatctggctactaaataattcaaactgacatatatggatcccattgtatttctgttgagcagtgtggctctgctggagagacacagattcccgctagtttcagttaagtgcttcatcataaaccatcccaaaacttggttgcccaaaacaacaaccaatttttatttctcacagttggcagaggtggctggatgtcagccggaaagtttcttgactgcttttgcatgagtatctcctatgtttgcagtcagatggccaccggggctgtggctcgggctggatgtcagccaccagggtgcttctcgtggcttcactccacgtggcatctcagtccccagggccactctggtggcctctctccattgaggaaccctggactccttgaaccctggacttcaaagggggtagagattgctgcagccccgcattataaacacttgggtttagaagccacagaataccatttcctccatattctattggtcaaagcaggtggagaaccagctctgaccaagagggtaggggatcaaaccttcacctcttgatgggagaggcatcaggcactgacaaggaagggcagaattatttggggccatcttagggaggcactcatctcgctggcagagatagccgttcagcttgtctaaggtgagacttctggtcttcatatttcacaagcatccccagtggctacacctggaaggatacttccttagggggttttcataagatcttggagagtaagacattttttcgtgagtcttgcctctagcagttaatactggaagaagcttacgatgacagaaagggatggtggtaaatccattgttacctccatgatcatgtataattaaagaacggttataaaatcaccattgcttttgttaagctcagcaaccattacatgaagctggaaacctggttccagagtgttaaggagcaagctgtgtgtatcgcaggttctgcagcatcctgaaacctcaggagagagtgaggggagaagggtgtgtgtgtgtgtgtgtgtgtgtgtgtgtgtgtgtgtgtgtgtgtgtggcctggtactcagaaaacaggtgctggagccagcctgtgtggttttaatcccacttctgtagtcatgtgacctaagggaactgtcttaacctctttttgccctcatttcctcacatacaaaatggggcacagcaaatttatatggttcttatgaagattaagtcaagacctataaagcattaaaacaatgtctataaggccgtgcagacactcagcatggctatttttatttctacagaaccatctgtggcttagtttttatacctcagtaatcctctctctctctctctctctctctctctgtctctctctatctctgtctcagagaagtgaaaaagagaactgacaaggatgacagcagatccattaccaatctaaccgggaccaattccaaaaagtcaccacagatgaagaattgttgcaatggctaaatcccaaacatccttggcctgtgaagtcttcatttccagaatactgaatttgtgtgacttatttggctcttaacagagtggcacatcctactgacactgtcctatggagagttacagtgcaggaaacctgaacccagctctcaggtccctctggaactttggctcttctttgttttgtctcagtgagtgatttgggccctctggctaaatagactagtcatgtccttacaggtcttaaaagataacatgtaaatgtttttaaaatggtaaaaaaaaagaaaagaaaagaaatcacatgctcagatcaaagctgtagaggaaactgacataattagattcatgtggtagctgaattaggttacccacaaagtcagcatttaaatatttgatactaaagttctagtaagaagggattctcatcctagctttgctgttaactggccttgtgaccttggacatgtcacaagcccatgtcggatctgtttcttcatctgtaaaatgtgcagcttgccctcaaaggccttgcagcccttggcacctcagattctgtgggaagcagtaggacagagagtgtggtggcccacagttaataatagaactatggttattcctgctttttaatattggagtattgatttttctcacttctgaaataaggacagaatttgattaaaaaatggaaacagaaatatctattttttatgtataaagaaacatgtttgagacaaaaatagttgtatataaaaggatatttcataatctcagaatagttacaaagctcactgcttgaatttggtgttaaaaattctaatggaaacatgtaaagccacatactactgaaagcacaatgcccaggaaagttgtcactcttcacttaagggagtggttgccaggggctgagaaagggaggatggggagtgactgctaataggtatgtggtttctttgggcgatgatgagaatgttctggaattggaatagtggtgatagttgtataactgtttgaatgtactaggaaccactgaattgtatactttgaaagggtgaattttatggttgtgaattatctcactaaaaaaaatgctagtacttagagtgatgtaacattttgcaaaattttcattttcgtatccctgctgatttcaaaccttcccatggtttagaagcataacctgtaatgtaatgcaagtcccctaactccctggttgctaacattaacttccttaagtaataatcaatgaaagaaattctatgcatggttttgaaataatatccttgaaagaggaatcaccattaggaaaggtgagtcagggtcctttgtttaatgtgactagtggctcatcatcaccagtgacctggttgggcctactctccttccagaacctgcattgcttcccagacctccccactgagatgcctctaagagccaaaggagtcaacacttgagcctagggtgggctacaacaaaagattctaatttaccttgcttcatctaggtccaggccccaagtagcttgctgaaggaacttaaaaagtagctgttatttattgtattgtataagctaaaaacatttatttttgttgaatcgaaacaattccatgtagcaatcttttttctgttcacggtgtttgtgatagaaccttaaattccgcaagcatcagttttttgaaaaaatgggaattgaccggatagttacaggcaaagattataaatagctacaacatcatttaacttttataaacatgccttctctctattgaagacatctgatatttttgctggaaagttggatctatcctcagtaactctgccatgaattcctgtttcctggttccagaaaaagaaaagattacatttctgatcataaagaatgtcttgcatatgggaaatttttcaaaataaggggggtattatttatgtggcatgggaaaacttttgccatggctgtttgtcttagtggcatcttttgatgacattggatcagatatatgtagatgctgatatatgggacacatgtttaggttttggtgcagttgcacaaaactgtgttagtttatatgttactgtgttgcctttatttattctctccaaagtgtctctttatatttgttttacaatctgtgaaagagtataccataatacagaagtattttcatagtctttacctctggattgtcctgtcagtatagccacgttgatgagattacaccagtgcctttgatggtcaaccaatcatctttaagtatttgagccctgataaatattttggtaacataatccaaattagagacttagagctctggttagcaatcatgtttaaagagaagcttcttaaagctctgtatgctgggagattcatgattattaccaacgttttgatttcatgaaggtgttctcaaatttaaagcacattttcagtaagaacaaaaatatttaatgtttttatcttagacttgatacatttgcatattactatggaagttattcaccttgtccctgtttttctttaagatattttaaaatcatagttatactacagtccttttttaaatgtatcctgatacattgtaaaatattttaatttcattgtggaaaataatgttggataaggagatatttttcactgttaacttttagcccatgcattttcataatttatttttttcacttgctgctttatatgacatatgtgacatttgattatttaacacttgatgtgatctgcataaacccaagttgcacaaccctcctgctgaagataaaattgaggttaaagataaagatttattttcatatttgtacagtgatcggcttcagtgatggtttttgtgggcatttattgtgtgtgtgtaagaaatttcatatgtatatattaagtaggcctctgagtattgaataattgttttatgattttgatttatatggtttacattttcattgtgtgggccatatttcgtttatactgtttatttctcttcaaaccttaataattataccataaagtgtaatttttatagcaatgcaaatgtctaaggaactacaaatattttctacgttgtaaattcaataaagcttgcttcctttggcctttt

SEQ ID NO: 704 - DNA, 62616 bp, Homo sapiens
agtctggaattcagatgcctattggtgactgctccgtggcagctaaaccaagaaaacagctgctctgctcattatttcaaaccacactagggtacagagctcgtgcttcgggatggaaacctatggttatctgcagagggagtcatgctttcaaggacctcatgtaagtaattcggaattcaatagagctttattattgaaattgcaatcagaaaaaaaggggggaaaaaggaaaattacaaagaggaagaggaaagctttggttttaaatctatcaaatccatcatttttaaagacttttttactgctaactcagtttagtcattctgtggctgctacttgcttctcagttactgtgccaaaattcagggtctttctgcatctccaaactgaaagttgaaattgaactcttttctccagattcctggcactttcatcagataaagtggggttccttttactttttgagatctctgtttcataaatacagtttatttccaaaacatgcaaagtttaactattttgtttccttcccttttgaaacatggcatgtagagctgcctgatttgtacttcttttccctcagttatttaactattgactgatcacatgattggggtgggtgcatttactccaagttaattagtatctaagtcaaataaaaaggaaattatcatgtttatcaatatataaatgcgacatatagtgtgctatactatagtgtagtttattaaacctaatttttcattgaggcatatggaaatccaaatgttttaggaaatcatcatcacagttcaattaggtgattaaaatatatattcaatttaaagatcatctatagttaaggaatggcttatacaaacgtgtgtgtgtgtgtgtgtttaaagacaggatcttgctctgtcacccaggctggattgtagtggcataatcatagctcactgcagctttcaactcctgggctcaagggatcctcctgcctcagcctcccaagtagtcaggactacagacacagactaccatacccggcaaacttttaaattttttgtagagacaaggtcttgctgcgctgcccaggctgatctcgaactcctgggctcaagtgatgttcctggcttggcctttcaaagtgctgagattacaggcgttgagcccctgtacctggccttataaaaacttttcaatcagatgatattattcctgcaattattgccaacacagtttactcctagctgtatcaccaatgcatactttctatctgccttcttcaatgagaatttattatttttattttttattagcacacttaaattgaaattcaaggtcagactttctgagcttctagctggaacttgtaagtttttttcctcgtgtcatcaataaaatctgcttagaaatggttgtttctagttatgaaagtaatagttgttctactcatctctccatccattttttttgtataactgactttaaaaatatggcctgaaataatcatttcattcatttgcctaatgtttggtggtttctatggccacacaagctctgaaatactctatatggcctttaagttatcttccaagttactctgccacttaataattcaattatcttttccaatattcctcagtaaaacctttctcctgtcaggctggtctcccctgtatgctattctcatgcccattttattgtcttcaatcacatcatgttctctcttccaggaaatactcttttaaaatgtaaaactgatagggttttgtggcacactgaatgtgagacagaaaggaggtgcagaggtcaagaatgcctcctaagatcctagtaggtgataatacgattcactgagaattaggacggaagagaaagcccaggtttataaggaagaagaaagctcaattttggacaagcggatttgaagtgcttgtagaacacatccaaataaagatgtcctataagtagctgaatatttgggtttggactgagaagactgggatagaaattcacatctaggaatcattttaaatgattgtgaaaccggccgggtgcggtggctcgcgcctgtaatctcagcactttgggaggccgagtccggcggatcacgaggtcaggagatcaagaccatcctggctaacacagtgaaaccccgtctctactaaaaatacaaaaaaaattagccgggcatgatggcgggtgcctgtagtcccagctacgcgggaggctgaggcaggagaatggcgtgaacccgggaggcggagcttgcagtgaacagagatcgcgccacggcactccagcctgggcgacagagcgagactccgtctcaagagaaaaaaaaaaaaaaagaatgtgaaaccatgcaagtggttgaagtcatgctggagatacactaaaatgagatataaggaagactacagaattctagaaaatacttttatttaggagtttgagaaagtatgagtcagagaagttggaagtaggcaggaaatcaggtgtcttgcaagcccaggatgtaaaatatctcaagaataaggcagtgaccaacagtgtgaaaaagaaggggttaagagaagagaagccagagggcagagaagactaggtacatgggcagttggaaaaagagggtacgtggccaggaaagcaccgctaaatatttaacaaaggtgtaagagcctgacacaatggctcacatctctaaccccagcacttcagtaggttgaggcaggaggattgcttgaggccaggagttcaagatcagcctgggcaacatagcgagaccctagttctaaaaaaattacaaatattagccggacatggtggcacatgcctgtagtcctagctactcaggtggctgaggggagaggatagcttgaacctaggaagttgaggctgcagtgagccatgatcctgccactgcactccagcctgggtgatagagtaagaccctgtcacacacacacacacacacacacacacacacacacacacacacacacagtaccatagaccgaagcacctgggtttccgcagaattttatgccccattaaatttagtgatgtctaacagtcattcagttgtctaagatttagacagctattatgtgaaaaataccattaaagagttccaaattggccggacgcgatggctcacacctgtaatcccagcactttggggggccgaggcgggtggatcgacgtcaggagttcaagaccagcctggccaagatggtgagacgctgtctctaccaaaactacaaaagttagccaggtgcggtggcaggtgcctgtaattccagctactcgggaggctgaggcaggagaatcacctgaacctaagccgaaatcacaccattgcactccagcctgggcaacagagtgagactctgtctcaaaaaaaaaaaaaaagagttccaaattggccaagagtgacagtagaacagagtcaggggcagaaaaatctggtgaaacaggtagggtaagaaatgtcattgggtgctttgggctaagagtaaacagtgtatttcaaaacacgtaaagtttatggagtgtggccaggcgcagtggctcatgcctgtaatcctagcactttgggaggctgaggtgggtggatcatctgagatcaggagttcgagaccagcctggccaacatgtcgaaaccccgtctctactaaaaatacaaaaattagctgggtgtggtggcgggtgcctgtagtcccagctatttgggaggctgaggcagaagaattgcttgaacccaggaggcggaggttgcagtgagccgagatcgcaccactgcactctgcctgagccacagagtgagacattgtctcaaaaaaaaaaaaaatttatggagtgcataatgtctagcacaaatttgtgtctccaatgtatatcttcctccagatcctcaatctcatggaaatgttctgtaggtgctacaaattcaacatatccaaaattaaagctcattatcttctcacctactccagcccatctccaaacctgcttctctaagtgcagtggtgcaatcttggctcactgcaacctccacctcctgcactcaagcaattctcctgcctcagcctcctgagtagctgggactacaggcgcacgccaccatgcccagctttttttttttttttttttttgtatttttactagatgaggtttcaccaccacgttggccaggctggtcttgaactcctgacctcaggtgatctacccgccttggcctcccaaagtgctgggcttacagatgtgagccactgggcccggccccttctccacattcttatgattccaatcctctcattctctatttccattattaccactttagttgaggtcctgaaatattattcctaactggtttcccttcttccagtccttcctcctcttcccaatccatcttctgtagttctttttttttttttttttttttttttgaggcggagtctcgctctgtcgcccaggctggagtgcaatggcgcgatcttggctcactgcaagctccgcctcccgggttcacaccattctcctgcctcagcctccctagtagctgggactacaggggcccgccaccacgcccagataattttttgtatttttagtagagacagggtttcactgtgttagccaggatggtctcgatctcctgaacttgtgatccacctgcctcggcctcccaaagtgctgggattacaggcttgagccaccacacccagccatcttctgtagctctaattaagcaaatctgatcatgccatttccctaattaaaaactctcccgattatagtgagggaaagtctaacctccttagcataacatcatgcaaggcccttgctgaactgaccttgctcacatcttgtctgcatctcccagttactttctgcctccacacatctatctcataagaccgccaaatttcccaccttgtttttaaattcaccatgctgttttatgcttgacttattataaagattgagcaagagtgttgtgttactacgatcgtgagcctagatggtggaggatgaccggtgcaggcagttgagtagaagcaatttggcctagccagagagaaaagaacaaggatggctaggaatctttggtagaagatgtgatcctcctttgactgaatgtttattgactgtgtttctcacctaaggtatgattcaaggaactatgagggagacaagcataccaaacagggctaacttcaaggaatttatgatctgattttaaaaacgtaggtcatatatagtgaggtgactaatatgactgatttttctcgggttccttataatacatcagatgtctaatattacagtcacaaacatatacattcaaagataccaggtaattcatcataagtataactaataataagtttgaggtcaggcatggtggctcacgcctgtaatcccagcactttgggaggccgaggcaggcagatcacctgaggtcaggagttcgagactagcctagacaacatggtgaaaccccgtctctagtaaaaatacagaaattagccaggtgtgatggcaggcgcctgtagtcccagctacttgggaggctgaggcaggagaatcgcttgaacccgggaggtggaggtttcagtgagctgagatcgtgccactgcactccagcctgggcaacagagcgagactcggtctcaaaacaaaatgaaacaaaaagtttgagatgagtaaagacaagtgctccgggaattcagagaaggaacagattattttgggatagggtgttcatattaggtttcacaatagagatggcgtttgaaacctgattgggtgtaagcagcagacaaggaagagccttctaactttgaggaatgatacaaaggtagagaaagaactctttggggcagaaggatccgggaggggaataatgttggtaagatcagcaaaaggtcaggacccttaaattgtggaggaccttaaatgacaaacttgttcccctaggcatactttatctagcagggaatgggggaccactgaagtttttcttaaagtcttaacgagatgaaagcagccttttaagaagatttaatcaggcaataatgtgcaagatagatgaaaggagcgagggaatgcaggcaggaaggacaagaagaaatagagtaatccaggtctttgttaattccacttatttattttattattaagagatggggccttacaatgttgcccaggctggactcaaactcctgggctcaagaaatcctcctgtcaggccgggcgtggtggctcacgcctgtaatcccagcactttgggaggctgaggtgggcggatcacgaggtcaggagatcgagaccatcctggctaacatggtgaaaccccgtctctactaaaaatacaaaacattagccgggcgcggtggcgggcgcctgcagtcccagctactcgggaggctgaggtaggagaatggtgtgaacccaggaggcggagcttgcagtgagccgagatcgtgccactgcagtacggcctgggcgaaagagcgagactccgtctcaaaaaaaaaaaaaaaaaaagaaagaaatcctcctgtctcagcctcccaagtagctgggattacaggcgtgcatgcactactgcacccaggttaatagtgggctttgatgcccgattttcttgattctaaaacactattgatataatagtttgtataataaaaaactctacattaaatatttacattgattataaatattgattttaggtatataaaatcatttaaaaaaagcatctcagaattaaggaaataagatgataagatctgaactaaggccaggtgcagtggcttatgtctgtaataccaacactttggaaggcagaggcaggaggatcacttgaggccaggagttcgataccagcctgggcaacaaagcaaaaccctgtctctacaaaagttttgataaattagctaggcatggtggcatgtgctttaagtcccagctacttgggatgctggggtcacaggatcgcttgagcccaggattttgaggctgcagtgagccacaaccataccactgcactacaagctgggctagagagcaagaccctgtctctaagaaaacccaacaaccggccgggcgcggtggctcacgcctgtaatcccaacactttgggaggccaagatgggcggatcacctgaggtcaggagttcaagaccagcctggccaatatggtgaaaccccgtctctactaaaaatacaaaaattagctgggtgtggtggtgggcgcctgtaatcccagatactcaggaagctgaggcaggagaatcgcttgaacctgggaagcagaggttgcagtgagctaagatcacaccactgcactccagcctgggcgacagagcgagactccgtctcaaaaaaaaaaaaaaagaaagaagaaagaaaacccaacaacataaactgagataacattttgaattatttgaaagattgaatgttaaagtcagagagagcgaagattaaaatatgactccatgattttgagtctgaatgaaagtgtcaagttagtaccattaaaagaaatagcaaagtcaacaggataaaatgaactttcatatattgagtttgaagtgaggaactatctagtaggcaattgaacataggggcctcaagctgggaagaaaggccaggctggagtatgtatcctaggaattacctacatggaagtgataatggaaggcttgagagtgagccaatttctgaaagaatgagtacgcagaggggcaggggcaggagctaatcataagagagtgttcatgttaaggggcaagaggaggagtagggacaaaaaacaaataatttgaaaggtagaattatattcattccagagtaggggcatgaaaaacatgaggagagagagaggttgaggccttatgttcatgcttaggcttttttttttttttttgagacggagtctcgctctgttgcccaggctggagtgcagtggcaagaacttggctcactgcaacctccgacttccaggttcaagcgattctcctgtctcagcctcccaagtagctgggattacaggcacacagcaccacacccagctaatttttatatttttagtagagatagggtttcgccatgttggccaggctggtcttgaactcctgacctcaggtaatccacccactttggcctcccaaagtgctgggataataggtatgagccaccacgcccggcctgtgggctattcttcagttccaggagttctggaccagtaccttggctgtttccttagcttacgttgggaaataataaaatttccccagaagcgtgttactgatattcagtgctgttgatcttagctagttcctttaaagtccagaagaacatacttcccacatacctttgtttgtttttgagatgggggtctcactctgtcccccaggctgagatgcagtggcatgatcatggctcactgcagcctcagcctcccaggctcaggtgatcctcccacctcagcctcccgagtagctagttactccaggtgcatgccacgatacccagctaattttctgtattttttgtagacattgggtttcaccatattgcccatgctggtcttgaactcctgggctaaagcaatccacccgactcagcctcctaaagtgctaggattataggtatgaaccaccacacccagcttcccacataacttttaatgagaagtttagagcataattgtgttgatccaacattttataagagagtcaaagttaaaggcaaactagtttttaacacatttccagttcttctggaatggctgtgccaatttaactttctgaatttctattagtcagggatgactgagcattctctgactcacttcatttcccaagcagccagataagaaataatttattggtttacaatatgatacttttttttttgagatggggtctcactctgttgcccaggctggagtgcagtggtgtgatcatgactcactgcggcctggacctcccaggctcaggcgatcctcccgcttcagcttcctgggtagctgggactacaggcaagcaccaccatgcccagctaaattttttaaatattttttgtagagacagggtcttgccatgttgcctaggctggtctcgaactcctagactcaaatgatcacaaaagtgttgggaagacaggcatgagccactgcactcagcctggtttacagtatgatactttcaattagcaataatcgcaccttggataaacctcattggctacgatactgccactgcacaaagctacagtatgatactttcatagcccataaagaaaaatatatatatgtaatgttcatatatatatatattttgtttgtttgtttgtttgtttgagacagtctcactctgtcacccaggctggagtgcagtggtgtgatctcagctcactgcaacctctgcctcctgcattcaagcgattctcatgcataagcttcccgagtagctaggattacaggcacctgccaccacgcctgactaattttcgtattttagtagagatggggtttcaccatgttggccaggctggtctcaaactcctgacctcaggtgatccacctgcctcggcctcccaaagtgttgggattacaggcatgagccaccgcactcagccaaaaaatatattttaaaatcctgagaaaaggcaatatttcacaaaaacaaagtcattatgttaatttgtacctttcttctatgattggcaaaggagcatagggatggctcaccaccacaggtgctctaaaaagctgactggtcggcatgataaactgattcgtaattggggctacaaatagtgattaaatggtcctgaaatataaatttcaaaaagattatcttccagttataagtatcttaatcagtacatttgtaagtatctttcaatgttatgctcttgcaaagcttaagctgatacagtttaggatattgctgaattattttcagccaatataatctctttttttgagactgagtctcactctgttgcccaggctgcaatgcagtggcacgatctcggctcagtgtaaccttcgcctcccaggttcaagcaattatcctgcctcagcctcccgagtagctgagattacaggcgggggccaccacccggttaatttttgtattttttttttttgagacggagtcttactttgtcacccaggctggcgccatctcggctcactgcaagctccgcctcccgggttcaccccattctcctgcctcagcctcccgagtagctgggactacaggcgcccgccaccacgcccggctaattttttgtacttttagtagagacggggtttcactgtgttagccaggatggtctcgatctcctgaccttgtgatccgcctgcctcggcctcccaaagtgctgggattacaggcgtgagccaccgcacccagcctaatttttgtatttttagtagagacgggatttcaccgtgttgaccaggctggtctcaaagtcctgacctcaggtgatccacctgcctcggcctcccaaactgctgggattacaggcatgagccactactcctggcctcagccaatataatcttaatccttacatgcttttcctgggagaaaagaattgctttccccatgtagtgtagcctcataaggctattctgcaacaggagcaattttcttttctggggaggctataaacaatctggcgtatgcagtgatatctggtttgtaaggtgtgttttacctctgtatactctagagtagggggtccccaacccctgggccatggactggtactggccagtgtcttgttaagaactgggccgcaggccaggtcgggcgcggtggcttatgcctgtaatcgcaacactttgggaggctgaggtgggtggatcacttgaggtcaggagttctcgaccagcctggccaacatgatgaaaccccgtctctactaaaaatacaaaaattagccagaccgcatgcctgtaatcccagctactcgggaggctgaggcaggagaatcacttgaactcgggaggtggagcttacagtgagccaagaagccaagattgcgccactgcactccagcctgggtgacagagtgagactccgtctcaaaaaaataaaataaaataaaaaaataactgggccgcataataggagataaatggcaggcaagcaagcattaccgtctacattcctcctcctgtcagaacagtggtggcatcagattctcatagaagcacaaatcctattgtgaacggcgcatgctagggacctaggttgaacgctccttatgagaatttaatgcctgatgatctcaggtagaacagtttcatcctgaaaccatccccacccccacttcccatggaaaaactgtcttccaggaaaccagtccctggtgccaaaaagactggggaccgctgccctagagactctggtaattaaaagtgttgtggctgagatacagtatggggtgagatacttaccagctagggaaagatatttactaaacaggaatatccagcttaatatggtgatgaattgctcagtttattccacctcttgttgatttcttcatgatattggcttagggcagagatggcacatacatggcaacatccttgactcccttccatctccctagaaaacaacatggcagacatcacaatgttaccgggggtccttgctcccagagctcccaacatggtggcgggttgcttccaagatggcagcaagcctctcgttctctgacctggggttcttggccccacggattccaaggaatggaatcttgggccatgcggtgaatgttatagctctattggaagacgtgggtcatggaagagaaccgtagaacccagcgactagtgttcatctcaattaggacgaacccaggcacttgccgtgcaggaacaacggcaagccttcagcccgatcgggagcagcagtgggcgcctcgctggatcaggagcacagcagacaccctgccagatccggaggggtggaagtcagcggcgggtctgcgactgcggcaaacagcagtggtggacaacgagcgaaagcttagcttgagcggtaacaaacacggtacaaacacggaccagaagagtatgcagttacaagatttaatagagtgaaaacacagctcccatacaaagggaggggagccaaagagggtagccgttgccggctggaatgcctggctttatatcctgatcattgtccctcccactgtgctctcaggcaatagatgattggttagttctttacctcctgtttttgtctgattggcattttagtgagctctctttactacctgattggtcgggtgtgagctaagttgcaagccccatgtttaaaggtggatgcggtcaccttcctaactaggcctagggattcttagtcggcctaggaaatccagctagtcctgtctctcaacagtacatactcttttccagtaaactctagccccagagtcatttttgacacagttctccaggcagccaccatcaatcggttggaagtggggatcgaaataaggttggggattctccctggctcacagttttactgttagtatcttctgaatgcaaggaacagggcatcttttttaaaaagaggatttaggccaggcacggtggctcatgcctgtaatcctagcattttggtaggccaaggcaggcggattgcctgagctcaggagttggagaccatcctggcaacatgacgaaaccccatctctataaaaaatacaaaaaaacttagccgggcatcgtggtgcctgcctgtagtcccaattacttgggaagctgaggcacaaaaattacttgaacctgggaggtggaggttgcagtgagccaagatagcaccactgcactcaagcctgggtgacagagtgagactctgtctccaaaaaaaacataataaaataaataaataaataaaaagatgatttaaggatacatgtagattaaaatcagaaagttgttcaggattcaagtcaagtcagggcctggattctctccctatggcctccctgtgctacctctcacagctatctgtgactatgtttttaaggtgccccattttcctttcatttccaactggccagtcctctccgtattccccagtccagatgtttcagagagctactttaacatgcacattagctaattaccattgtcactattagctagccacaggcttggtgccaggttttttcatgggtcatgaataggcagctcttgaggaggcagcctatgggcacaggtgatattttctctctttcatttagtgacggtttttactttatgaaaatttgaaattcaactgtgctgcttaggtatttattaacacttcaataaaaactttaggaaaaatttgtgccaaataatgtccttttcttttttgaaagcctcactaaactaatacatcaggagaatgccatagagattagaccttgattttaaagaagatgtcttttaaaatctcttaagaccttgatgtgagccattcagagagatgtgggctggataatagaagagttatgtgaactcttaactaatggaacaacttaaccaaaaaatgatgactgtaggtcgggcgcggtggctcatacctgtaatccgggccctggccgaggcgggcagatcatttgaggtcagaattttgagaccagcctggccaacatggtgaaaccccatctctactaaaaatacaaaaattagccgggcgcggtgacacatgtctgtaatcccagctcctcgggaggctgaggcaggagaattgcttgaacccgggaggcagaggttgcagtgagccgagatgacgccattgcactccagcctgggcaagagtgaaaccctgtctcaaaaaaaaaaaaaagtgatggctgagatgaaccttgagataggtttctgttataaagtgcaatgctctagttagtatagagaggaaacactgggtggtagtagctaagcaagtgggatcaagggctgggctcttctgtttaacagctgtgcaacctcaggcaacttcgccttctgtattttggtctttttgtctgtaaagtagggggtatatacagaatttacatcttaatgttgttatgagtactgatgaatatagatacaatgtttagaatagtttaggctattttagtttagaaatgtttaggctacgaaatacacgggtagaatttacagagaggcagagtactttaaaataattaaatcaccaaataaaataagacaagtctgttacaagaaatgttcccaaagtggccagataagcatctgtcaggggtgctgtaggaaggtctcccactctgatgagaaggttagattagaggatctcttaaagcctaggagtcattgatagcctagttatgccctgaatgcttgaagttatatttatgcttatggagtaatctctagaaaaatctgattttattatactacaaagccataagtaatttttttgcaacttgtagagttctcagactaaagtcaaatgaaaccaaatcatacaaaccaaacttaactagtgacgatttttggtatgtcaattcacaatgttaaacagtaaagtaacagaaatccagaaatgtaatattatttacccataggaaagtgatctcaaaaagccaagagaaaatgcctcctaagggtccttgctgcaatttgatctcaagaaagcagagaagaaaattctaaaaagattatttcatttaaggttaaatgattatggaaatataaaattctcagtgttggtcaaacacaaaacttgcaggtggcttagaaagtgcatacaattctcaaaatgtattccctaccgttaaaggtatttatatttatagttatatttttctagctatattaagcattatttttaaaacacattacagtaaaatacacataaaaggtacatatatattacgtatataatttgagtttttacaaactaaacacacctatgtaatcagcacccagattttaaattgtttttgaagttaatttttcttacctttcaggaagaaaaatttaacgttctattctgcatatttggaggtacactatgtaactttaaaagcaacatacccatcttgacttcaagtgactttcttttttttttttttttgagattgagtctcgctctgttgcccaggctggagtgcagtggcgcgatctccgctcactgcaagctccgcctcccgggttcacgccattctcctgcctcagcctcccgcgtagctgggactacaggcgcctgccaccacactcggctaattttttttgtatttttagtagagacgggttttcacaagtgttcgccaggatggtcttgatctcctgacctcgtgatccacccgcctcggcctcccaaagtgctgggattacaagcttgagccaccacgcctgacctgacttcaagtgactttcaatacctcttgtggtaggcagaataaatagctccccaaagatatccacatctttttttttttttttttgagacggagtctcactctgtcgcccaggctggagtgcagtggcacgatctcggctcactgcaacctctgcctcctgggttccatttattctcctgcctcggcctcccaagtagccgggactacaggcgtgcgccaccatccccggctaattttgctttagtagagacggggtgtcaccatgttggccaggctggtctcgatctcctgacgtcgtgatccgcccacctcagcctcccaaagtgctgggattacaggagtgagccaccgtgcctggcctagatatccacatcttaatccctgaacctgtgaccatgtttccttacttggcaagagggactttgcagatgtgaccaggactttgagagggaaaattatcttggactattgagtggacccaatgtaatcaccggggtctttttaagtgagagaggaaggcagtagagtcacaaaagatgtggcaagggaggcagaagtcagaggtgccatgtgccaaggaatgtgggcagcctctagaatctggaagggggaagaaaatgaattctccctggcagcctccagtaggaaggcaacccaactgacaccttgattttggtcccttgaaacccattttggatccttaacgtccaaaactgtaggataatacatttgtgggttttttttttttttttttttttttttttttttgagatagagtctcgctctgttgcccaggctggagtgcagtggtgcgatctcggctcactgcaagctccgcctcccaggttcacgccattctcctgcctcagcctcccgagtagctgggactacaggcgcccgccaccacgcccggctaatgttttgtatttttagtagagatggggtttcaccatgttagccaggatggtctcgatctcctcaccttgtgatccgcccgcctcggcctcccaaagtgctaggattacaggcgtgagccaccgcgcctggccaatttgtgttgttttaaagaccctaattttgtggtaatttgttacagcatatgtgaaactaatacaccatttatagtctggtgagtctgtcttcagattcatatatctcactgcacatttaatagcttcatgtggctcacaggcatctcaatcataacatgccctaaattaaaactttacttttttcttcccaaaccaggtcactctcccagcctttctcatcttagcacacaaccaaccacccaattcctaatggcagaaacctggaagtcatttctttctttctttctttttttttttttttttaagagatgaggtctcgatccagcacccaggctggagtgcagtggtttgatcgagctcactgttgcctggaactcctgagcacaagcgatcctcccacctctgccttccaaagtgctgggactgcaggtgtgagccaccacacctggcccggaggtcattcttgagtctttttccctgtcatccccttatatctaacctataattaagtctcatcaattttacttccaaaataaacatcatatccatccacttcagttgagtttcactgctaccaatccattctccacagagcagccagtgtgatttaaaaaagaaatctgggcctggtgtggtggctcatgtctgtaatcctagcactttgggaggccaaagtgggcggatcacctaaggtcgggagtttgagaccagtctggccaacatggtgaaacccccgtctctactaaaaatacaaaaattagccgggcatggtggtgtgtgcctgtaatcccagctactcgggaggctaaggcaggagaattgcttgaacctgggaggtggaggtttcagtgagctgagatcgtaccactgtactccagcctgggcgatagagtgggaccctgtctcaaaaacaaacaaacaaacaaaaaagaaatctgatagcacttccttgcaaaaatcccttaatgtcttttcttttgtggctaatgtgaccttttcgtggctccaagctagccacaggagaactaagagttcataagtattttacaaattagagcttcattattaattgaaatgcatcacaaactgcagtttgatgagatttgaaatttgctgtacagcaagaaatctcaatgaactgttagacttagtttcacctgtggtaaatttttaatggttgtaaaaaaaaaaagatgttaatattttgtatcatcaacttcattcaaagtttcttgtcaatggtgactcaggaatctgttgcccaggttggtctcgaactcctggcctcaagctagccttctcacttggcttcctaaaatgctgggagtgactcagaaatttgaaagggtcattaaaaagtcttaaagcctgattcggtggcatggtcctgtagtcccagctactcagaaggctgaagccagaaaagatggcttgaggccaggagctcgagtgctgcctggacaacatagtgagacccttgtctcaaaaacaacagcaacccaaagtcttatttatcttcaggagctgcgcaagccctttaccaccgccacgtttctccctggatgtccctaggcctcgggactggctgggagttccctgtagtggaggccgccgctgaactgattataaagatgagagaggctctgccatgccttggtcatcaattcacactccaccagtgtcttctagcagtcacggcaagggttaacgtcagggaccgctgtggggtggccgcgctacacgacagtatagttgcggtcctggtttatgaaataactgagggaacaagaggcgcaagaaatccctccttgggtgcaagaccaaaacaactacccagcgggaagactcgggcttcagtgcgtgtgtcgccagtggaggaggacgcttcggggcgggagcacaagctggcaggacagccccgcagcagctccagcgcggcagaggccatggaagatggtccgctggtcagcaccctgcctgcgcctcaaaataccgccgggaaggtgggggacggggacgggagcagccaatcacgcgagctctctcgggtggcgtcagggcgcgatcgcggattcggcactccgggtgggcgtggctgggcgagcgaggagtggggacaaggtcgagcgacgagtcgtctacccgcgcgcccgagcgcggaaaccgaggggcaggctcgcgctctgcctgcttcgtggcgcttggttcgtccctcgcccgaggagcgcggtggcggcgtgggagggagcctctgacggcgtctggtgagagccgcgcggcggcgtgggactccgggagagcatcctgcccacccccagggccgcctcccccggcctcctgccccaggcctcccctccccggccgctttccaccccaccgcgccccgaggcccacactggacccggctctcgcccaatgtcctgcaggcctcaccatagggcacctctttggcccaattcagggctccgccgtgtggctcggggtgggccctgatgagcaggggaggggatgtagagggaggcccaggttgacttgtcccctggaacagtgctgtccaatcaggggggatgctgactgtcccgttaggagcggggcggggcgagagagggtggagaactgcctggcaggcgagctgtcctggcgtgaaaaggctgggctaaaaggtcccctccctgctctgagtctacattctgagtctgggcttccttgtatatttgagaaacgttaattccccgccctcaccccaatttttttttttttttttttttttttttttttttttgagactgagtctcgctctgtcgcccaggctggagtgcagtggcgcgatctcggctcactgcaagctccgcctcccaggttcacgccattctcctgcctcagcctcccgagtagctgggactacaggcgcccaccaccacgcccggctaattttttgtatttttagtagagacggggtttcaccatgttagccaggatggtctcgatctcctgacctcgtgatccgcccacctcggcctcccaaagtgctgggattacaggcgtgagccaccgcgcccggcccctccccccagttttacgcttgtaaaattgttagaacacaagaacgtattttttactactctggtaggaggggtggggtacagtttcgcagtataggtaactcgttaacccaactgtaggagcgccgcagttgaagccaaaccgaattatagcgtcggaatggggccctgactttcagacagctttatatagctctttccttcttattcctttgagtcccatcctcattgcactgatgaaagggcgatttatcatgttttcgaggaagatttgtactcatggatgtttatggaatgaacagacacaaggcaaacactgggtgtgggacagtgttctgagcgctgaagtcattcagacaagggtttgattttcggttctctcaatgatgaacttgggttcaagtaattctcctgcctcagcctcccaagtagctgggattacaggcgcctgccaccatgctcggttaatttttgtatttttagtagagacggggtttcaccatgttggtcaggctggacttgaacagacatcaagtgatccgcccatctcggcttcccaaagtgctggggttacaggcgtcagccaccgcgcctggccaatgatgaactattaaacagtgatttggggcaagtaaattattttctctgtgcttcctgtctgtaaaacgcggctaatacgagggctgtgaggatgaaatgagttaatacatgtgaagaaacctattagcacaatgtttggcacttcagaagcgctcagcaaatgtttactgttgtttcctctgttcagtgactgcttgacccaagtgttcattatttttatttgatagccttaaaaatattctcttcacaaagaactctttccacggttgagtggggcattatttttctggaaagggttaatcaccttttgtcagcatttataatggacggtcttgagttgagagaatgcagaaagtagtctttaagaatttgggtttctgccgggcgtggtggctcacgcttgtaatcccagcactttgggaggccaatgcaggcggatcacctgaggtcaggagttcaagaccagcctggccaacatgatgaaacctcatctctactaaaaatacaaaaattagctcgatgtggtggcaggcgcctgtgatcccagctactcaggaggctgagataggagtatcgcttgaacccaggaagcggaggttgcagtgagccgagattgcaccactgcactccagcctgggcgacaggctgtctgtctcaaaaaaaaaaaaaaaaaaaaaaaaaaagaattgggtttctctggctgggtatggtggctcatgcctgtaatccaagcactttgggaggccaggcggcggatcacctgaggtcaggagatcgagaccagcctggccaacatggtgaaaccccacctctactaaaaatacaaaaaaattagctgggcatggtgtcacatgcctgtaatcccagctacttgggaggctgaggcaggagaatcgcttcaacctgggaggtggaggttgcagtgagctgagatcatgtcactgcactccagcctgggcaacagagtgagaccctgtctcaaaaacaaaaacaaacaagaattgggtttttcagcgattgccagtgagttcaagatgaaggcaaacttgtccgaaaactatcatctatctgtctaacatctatcatccatccatctgtcacctattatttgtttttctgtctttcttttggtggctcaggtacaattatagaattgaagagtgaaatggatgcaagtattcagtcccaccttctgactttctgagctctgtgctggacaatgcacctacttcataatgttcatttaaaagattgcttgtttttatttttttatttaaattttaattttttaaagatagggtctcactctgtcacccaggctggagtgcagtggtccttttccaattcgtactatagtttctttcagggaaaagaattatatagctggggaacacatatgagaagactttttgctatttagcctcttgtggcttttaatttacatttttaatttttgtgaggcaaggccaaggcagatgacttgaggtcaagagttcgagaacagcctggtttagttgaaaccgcgtctcaactaaaaaaatacaaaaattagccaggcatggtggcgtgcgcctgtaatcccagctacttgggaggctgaggcaggagaattgattgaacccgggaggtggaggttacagtgagctgaggtcgcaccactgcactccagcctgggcaacagagtgacactccgtctcaagaaaaaagaaaaatactgtgaggcaaaacaaatcattcatggtttgtcaatttatatttattttacaaagaacagtaaatgttccatctggcagtactaaaatgcctcgtacttaccagttactcaaaggttattctacctaaactgagagcaagctggccatatgagtaaactgaaaaatagaacaatgttacctaaggccaggtttatagacaagcttgccttcatcttgaactcactggcaatctgagaaacccaattatttttttttgagatggaatctcactcttgttgcccaggctggagtgcagtggcaggatctcggctcactgcaacctccgcctcccgggttcaagtgattctcctgcctcagcctccccagtagctgggattacaggcgcctgccaccatgcctggctaatttttgtatttttagtagagatggggttttgccatgttagccaggcaggtcttgaactcctggcctcaggtgatccgcccgcctcgtcctcccaaagtgctgggattacaggcgtgagccactgcgcccggccgaaactcaattcttgaaagcagctttttgcattctctcaactcaagactgtccattgtaagtactgatgaaaagtgattgcctccttacaaaaggaaatttacttgccccaggctggatttaaattttaatttttttaaagatagggtcttgctcagtctttcaggctggagtgcggtggcatgatcataactcactacagcctcaaactcctgggctaaagtgatcttcctgcctcagcctcccaaatagctaggaccgcaggtgtgcacaaccacactcagctaattaaaaaaaatttgtttgtagagacaggagtcttgctatgttgcccaggctggtcttgaactcctgacttcaaggagtccttcttgcctcagcctcccaaagtgctgggattacaggcatgagccaccatgtccagccagatttcttgtttttatttatttatttatttatttattttgagacaaagtctcactcttttgcccaggctggagtgcagtggtgcgatctcagctcactgcaacctctgcctcctgggttcaagcgattcttgtgcctcagcctcccaagcagctgggattacaggcacgcgctaccatgcctggctaatttttctttttctttttttgaaatggagtctcgatcagtctcccaggctggaatgcaatggtgtaatctcggctcactgcaacctccgcctcccaggttcaagcaactctcctgccacagcctcctcagtgctgggattgcaggtgcacgccaccacaccctgctaagttttgtatttttagtagagatggggtttcaccatgttggccaggctggtctccaactcgtgacctcaggtgatccgcccacctcagcctcccaaagtgctgggattacaggcatgagccactgtgcccagccaaagttgaatgtttttgctaaattttagggctcttataactctttgtatatttgaaaagctgatggccagcaatttccaaaattttgcacttttagatttgatatttccaatatctttaaatgttctcattctaccatttgagtcataattaaaagcattttaaaaagtaagatttgtggctgggcgcggtggctcatgcctgtaatcctagcacgttgggaggccgaggtgggtggatcatgtgaggtcaggagtttgagactggcctggacaacatggtgaaaccccgtctctgctaaaaatacaaaaaaatttggtgggtgtggtggcgggcacctgtaatcccagctactcaggaggctgaggcacaagaatctcttgaactggggaggtggaagttgcagtgagccaaggtcatgtcactgcactctagcctgggcaacagagggagactgtattttaaaaaaaaaaaaaagtaagctttgccccaacagtttatagaatatgttaccaattttgtaatatacgttgtgtatgtgtgtatgtatacacatacatacatcatatatatacacatcatatatatatatatttagatagagacttattctgttgcccaggttggagtgcagtggcaccatcttggctcaccgcaagctccgcctcatgtgttcaagtgattctcctgcctcagcctcccaagtagctgggactataggtgtgtgccacaacacctggctaattttttttgtatgtttagtagagatggggtttcaccatgttggccaggctgttcttgaattcctgacctctcgtgatccacccagctcggcctcccaaagtgttgggattacaggcgtgagccatatatttatttatattatcatagtttatccatggaaggacagataggaaaccagtaactgcttccagggaaaagaactagctagctggggaacacagatgaaaagacttattgctacttaacctcttgtgacttttcaattttaaaccatgtgaatatactacctgatcaaaaatttagttaattaaaattattttttaaaacctccccttaaaaaggcattttaccttaattttatttttaagatttaacttctttccttgaaaaagctttgactttttaaggttttttaggtttctaggtaacattgttgtatttttcaccatttatttatatggccagcttgctctcagtttaggtagaataacctttgagtaacctggtaaataagcattttagtactgccagatggaacatttactgttctttgtaaaataaatacaaattgacaaaccatgaatgatttgttttgcctcagcaaattaaatattaccaacaattttttcagctcaaatttgatcactggaagaaggattatatacaagaacacttacgacaaccatttttggaagaatatttttgtctctttaaagattagatagtgcggccacgtgcggtggctcatgcctgtaatcccagcactttgggaggccgaggcgggtggatcatgaggtcaggagttcgagaccagtctggctagcatggtgaaaccccatgtctactaaaaatagaaaaaattagcccagcatggtggcacatgcatgtaatcccagctactcgggaggctgaggcaggagaattgcttgaacccaggaggcggaggtcgcagtgagccgagattgcaccactgcactccagcctgggtggcagagcaagactctgtctcaaaaaaaaaaaaaaaaagatcagatagtgcttgggtcttctgaatataactctcttggtggaatgcccgtttcgttatattgtaagtgtttgccattgggtgaaattagcttttactggggattataaattcagagtggacctaatgatgggaccgtttgcatggtcacagaattttagcctaagagagtgttgaggtaccaacagcagagggctactgatggaatttccagtgaatttcagagtttaccctcatctaaaggatggcacccctagaattggaatccttactgaagtgtctctggattcctgattacaagttctaaatattgatacacttactgaaacatgaacattgagatcagagtccatgaggtgaaattttatgttgatttagagaagtttaacatgttccaagtctggctcagtggtgtatgcctgtagttccagctacttaggaggctgaggtgggggggttgcttgagcccaggagttccaggctgcaatgagctatgatcgtgcttgtgaatagctactgcactctagcttgggcaacatagcaagatcccatctccaaaaatgtaaaaactttttaaaaaattccataaaacaaatctcttattccttgcccctgattttactttttgaatggagggtatagcatggcagggagggatgagcgagcagtggagctgagcaacagtatatctgtgaatgggagggccataacgctcagagcgaggcagcaactgagaaacgtgggggaggaggacctgaggtttgtgtgaagcctttccagaaaggatgacacttagatggagttttgaaggatgagtagaagaccagcaaggaggaaaggaagttttaggaaaaagtaggtggcatctataaaggtatagatatacggagattcactagttgaactggaggcagtttggtatggctggcactttggcacagagaagggtaattttaggcagggaagagatggtggaaaggaagatcactttgaaagtttgtaggaggccgggcgcaatggctcttgcctgtaatcccagcactttgggaggccgaggtgggtggatcacttgaggccaggagttcaagaccagcctggccaacatggcaaaaccccatctctactaaaaatacaaaaattagctgggcatggtggtgggcacctataatcccagctactcgggaggctgaggcaggagaattgcttgaatctgggaggcggaggtagtagtgagccaagctcgtgccactgcactccaacctgggcgacagagtgagactttgtctctaaataaataagtaagaaagtttataggagacaggcaaaccacttgacagctgttaagatcgtccagacctaaaatgagggactggactaggggaagtccttgtatggatgaagaggaggagatagatttgaaagatatttagggggtggaattgacagcattttggagatatggggtgaagaacagaaaagacaaggatttgaaggcatttggatgaatgaaattgcataactcagagaacaattgaggaggaacagcttccgaaaagaaaatgagttcagtttgggacactgactttaaggtgtttataggacatacagcaggagatatctgataggcatttggagttgtcagttttgttggcactggtgtgtaggtactaatgagggcttgaaggtcaggtttttatcttactcatctttctcctgcccagcattaatcacaataccttgtatttaggaagtgtatagtgtgagagtgaatagcctgtgttccttatgagacatgatctggaatgttggggcagtaattttccctctcaagacctgtgtttccctttctataaagtgatggagttgaactagatcagtggttctcaacaactgattttgcaacaacctactatgttgggctcatctgtgagttatggcaagtaatttttaataataaagagctgatatttcctcaccttttaaacaagagctgatttatatcactccttcttaatggcattccagtgtgttttcttgagtgtgagaggatggggtggtgttacagttagtttgctggagtttcttcttctttttttttttttgagatggagtctcgctctgtcacccaggctggagtgtggtggtgcgatctcagctcactgcaagctccgcctcctgggttcacgccattcttctgcctcaacctcccgagtagctgggactacaggtacccgccaccacgcccagctaatttttttttttgtattttttagtagagacggggtttcaccacgttagccaggatggtcttgatctcctgacctcgtgatctgcccacctcggcctcccaaagtgctgggattacaggcgtaagccaccactcccagccttggagtttcttaactctggatataccaatgggagagtcacacataagtggaggtgcaaaaaaagattaagaatcactgtactaaatagtggttaaggacttgaaactgaaaatttctatttctgatttagagaagtttaaagtttagttatatctaggagttattctgattataaagtttttattttggcaatttcaggaactctattttaagaacctctcaaaacgaaacaagcaaatcatggagaagaatggaaataaccgaaagctgcgggtttgtgttgctacttgtaaccgtgcagattattctaaacttgccccgatcatgtttggcattaaaaccgaacctgagttctttgaacttgatgttgtggtacttggctctcacctgatagatgactatgggtaagatgaaagcattttcttattcttcattgcaacagtgtgctagaaggagcttgggttttgtagccatatgggcccagcttcaaattcctgttctgctgcttagtttttatgtggccttagagtagtcacttagcatctctgagcctcagtttcctcattatataatgtagtgaaaacttatattgtaaattattgtgaggaatggagatcatgatatagagcatccatcacaatgatgccgcttagtagatgattgataaatggtagctataaataatattactgtttgttattagttgttacattcaaacaaatgccacttataaatacatattgtatgagtataataatgtgattccatgtaaactgttttgtgagctgtaatggcaatctttaaaactggtttataggccaacagcatataaagtagtagatatggaacaagattttaaaaatctaatctgcaaggtaaagtagagagttacattactgtcaccattgacatttattttgctgacattaggtttgttattaatcacaggctacatttaaaaagtgaaagttgggccgggcacggtggcacatgcctataatcccagcactctggggggctgaggtgggtggatcacctgaggtcaggaatttgagaccagcctggccaacatggtgaaaccctatctctacgaaaaatacaaaaaaaaaaaaaattagccagttgtggtggcgcatgcccgtagtcctagctactcgggaggctgaggcaggagaatcacttgaacccgggaggcggaggttgcaatgagctgagatcacaccactgcactccagcctgggcaacaagagtgagactccgtctcaaaaaaaaaaaaagcaaaggttgaataatctgagagaacaaggcgtattacatacatcttgatgtatgtaataaaaagtcatttagtgcacccttgtggcatgaatatattaatgcagtctccaaagaggatcacaaatacaatactgtatctgaaagaaccttgcgttaaaataaaattgtccttttcagactattctttaaaaacaaggtgggaattcgctactaggaaatacttaaagagtagagaagaaacttaatggatagctcagggatccacagatttttttttttttttttttttttgagacggagttttgctcttgttgcccaggctggagtgcagtggcgtgatctcggctcactgcaacttccacctcccgggttcaagtgattctcctgccttagccttccgagtagctgggattacaggcatgcgccaccatgcccggctaattttgtatttttagtagagacggggtttctccatgttggtcaggctggtctcaaactcccaacctcaggtgatccacctgcctccgcctcccaaagtgctgggattacaggtgtgagccactgcgtccgtccagatttttttttaatataaaatgaattctggctatttaggagcatcctctcagtagaacagaaattttagctagagcctgagatgaaagtttgagtgggttcttttactgctctgagaaagctttgacaggaagactagtggaagagaggctctcagggaaatggtagtaggttttttatctgcctaccacagttaccaagggtggaagaatagtgtttatctgatgagaccgttaaataggaaatttgactagtacttaatgaaaatgcatgtttaaggtacattctaacacaagaaattggttgcttcttgggagaagaattggatgactgggagacaaaagtgagagacttttcaccatgaaatgttttcttaaagaaaaaaggtttggccaggcacggtggctcacacctgtaatcccagcactttgggaggacgaggcgggcggatcacgaggtcaagagattgagaccatcctggccaacatggtgaaaccctgtctctactaaaaatacaaaaattagctgggcgtgatggcacacgcctgtagtcccagctactcgggaggctgaggcaggagaatcgcttgaacctgggaggtggaggttgcagtgagtcaagatcgcaccactgcaccccagcctgggcgacagagcgagactctgtctcaaaaaaataaaaaaaagggtaaaaaacattttcccctaagtgtatataaaaagtgctgaccactgttaaaagtttagtctctttcttcctaataaaaaaattctctggccgggtgcagtcgctcacgcgtgtaatcccagcactttggtaggtcaaggtgggtggatcacctgaggtcaggagttcaagaccagcctggccaacatggcaaaaccccatctgtactaaaaatagaaaaattagctgggtgtggtggtacatgcctgtaatcccagctacgcaggaggctgaggcaggagaatcgcttgaacccgggaggcagaagttgcagtgagcctagatcgcgctactgcactccagcctgggcaacagagcaagacttcatctcaaaaaaaaaaaaaaaaaaaaaaaaaagaatcttaatcaggctgtttacacttatggtctatgctttttatgtttgtaagttatacttcaatttatttattttaatgtttctcacttcagagttggtgttagattgcttttcttgcatgttacggctctgtgtttaagaacatgttcttatatctttatttctccccggctttagaaatacatatcgaatgattgaacaagatgactttgacattaacaccaggctacacacaattgtgaggggagaagatgaggcagccatggtggagtcagtaggcctggccctagtgaagctgccagatgtccttaatcgcctgaagcctgatatcatgattgttcatggagacaggtttgatgccctggctctggccacatctgctgccttgatgaacatccgaatccttcacattgaaggtggggaagtcagtgggaccattgatgactctatcagacatgccataacaaaactggctcattatcatgtgtgctgcacccgcagtgcagagcagcacctgatatccatgtgtgaggaccatgatcgcatccttttggcaggctgcccttcctatgacaaacttctctcagccaagaacaaagactacatgagcatcattcgcatgtggctaggtacgtatctcagactttagtcagtctaatggctgtttttgtcagaaaatgttccgtctatttcaatccttttggaaactattatggatagaatactctgttagcaatgagaaggccaaggttttagttcatagaccttgccctgtggtatgactttacctctctgaggtttaccttttctgtaaaataggcttagtggattgagttttaaaaatctctgctatatttatagaatggaatgcttttaatccattaaatatattagttataagaacgatcctaatatgtcaaaagggggagctataaaattataagtgtaatatgccatttcattttattttatttattttattttttgagatggagtcttgctctgttgcctaggctggagtgcagtggtgtgatcttggctcactgcatcctctgcctcccaggttcaagtgatgctcctgcctcagcctcccaagtatgtgggattgcaagcgtggaccaccatgaccggctaatttttctatttttaatttcaccacgttggccaggctggtctcgaactcctgacctcaagtgatccgcccaccttgggctcccaaagtgctgggattacaggtgtgagccactgcacccagctgtaatctgccattttactaaaaactgtaataatggaatggttaggaagtatgtacaccaagtcatttattatatttatttctggtgtgggattatgggtgtttttatgtttgattttctgaattttttttttgttttttgagacagagtcttgctctgtcatccaggttggagtgcagtggcacaatctcggctcactgcaacctccacctcccaggttcaagcgattctcctgcctcaacctcccgagtggctgggattactatgcctggctaatttcatatttttagtaaagacagggtttttccatgttggccaggctggtctcgaactcctgacctcaggtgatccgcccacctcagcctcccaaagtgctgggattacaagcgtgagccaccgtgcctggcctgattttctgaaattttttactacattggcaaaatggtcattttttttttttttttgagatggagtcttactctgttgcctagcctgtagtgcagtggctcagtctcggctcactgcaacctccacttcccgggttcaagcgattctcctgcctcagcctcctgagtagctggggttacaggcgcacaccaccacacctggctaatttttttttgtatttttagtagagacggggtttcactatgttggtcaggctggtctcaaactcctgacctcataatccgcccacctcggcctcccaaagtgctgagattacaggcatgagccaccgcgcctggctcatttttatttttaatgcttttcttatagaattgttggaatactcagattatgaatgttggaagcagtaagccataagtacttattaatataagggattatgatgattattaaaaagcaaaagtcatagttgtagccttagagtatatctttgtaaataagccctatgttccaaaatttttattgttcagtgctctagcttcctagaaattatcttttgctaatcagaggtaaaaaaatccaagtttacaaacagaatgtcagttggttaatttatagtaagagtactacctaggggacaaattaggactaataatctatttaggacctttcatttctaagaggcagatctattgaattataaaattaatgaacagaaaattgatttggttgggtcaggtatggtggctcaccctgtaatcccagcactttgggaggctgaagtgggagtattgcttgagcctaggagttacaaggccagcctgggcaacatagcaagacgctgtctctacaaaaaataagaaaattagctgggcgtggtgctgtgtgcatgtagtcctagttacctgggaggctgggatgggagggtcacttgagcctgagtagttgaggctacagtgatctgtgattacactgctgcactctagcctgggtgacagagtaagaccctgtctcaaacaaaacaaaacaaaaaaaaacaaaaaacaataacaaaaaaaaaacacagaaagaaaaagaaaattgaataagcaaagagattttgtatatttttaatctagattacattacatcaggaaaggaattgggctttcctgctatataacgtactccattctacatatttctgttgttcagtctggagtgcagtggtgcagtcttgtcctcctgggctcaagtgatcctaccacctcagcctcctgagtagctgggactacaggcatgtaccaccatgcccagctaatttttaaaatttttttgtagagatggggtctcactattttgcccaggctagtcatgaattcctaggctcaagcaatcctcctgcctcggcctcccaaactgctgggtttataggcatgagccaccgcacctggcccattctaaatatttcttatgcttggacagatttgtaattatcaagggatcgtctagataatgctggtggaacaaccttctgtctcttcagtctctccttttagtatgcttccgatgaaacactcttggattctgttctaattataccattagctctctaggtattctggaaaacttgtatcactgaaaaacttgtaatgaatagaaaataataatgtgccagatgtggtggcacatgcctgtaatctctgtactttgagaggccaaagtgggcagatcacttgagcctaggggtttgagaacagcctgggcaacgtggtgaaactctgtctttacaaaaaatacaaaaatcagccgggtgtgatggtgtgtgcctgtagtcccagctactccggaggctgaagtgggaggattgcttgagtctgggagttcaagactgaagtgagccatgattgtgccactgcactccagcctcggtgacagaataagaccctgtctcaaaaaaacaaaacactagttttggccaggtgccagtggctcatgcctgtgaccctagcactttgggaggcccaggcaggtggatcacttgaggtcaggagttggagaccagcctggccaacatggtgaaaccccatttctagtaaaaatacaaaaattagccaggtgtgctggcacatgcctgtactcccagctactcaggaggctgaggcaggagaattgcttgaacccagggaggttgctgtgagccgagattgcaccactgcactccacactccagcctgggtgaagaagcgagactccatctcaaaaaaaaaaaaaaaaaaaaaaacaagcataaaacccaggccagatgcggtggctcacacctgtaatcccagcactttgggaggccacggcgggcagatcatgaggtcaagagattgagaccatcctggccaacatggtgaaaccccatctctactaaaaatacaaaaattagctgagcatggtggcgcacacctgtagtcccaggtacttgggaggctgaggcagaagaattgcatgaaacccaggaggcggaggctgcagtgagccgagatcgcgccactgcactccaatctggcaacagagcgagactccgtctcaaaacaaaaaacagcaaataaccattagaaagcagaatgtagcaaaattgaattgtacttgtagggcttaaagtcctatttgggacaatttaagcagttctttatggaaagaaggacaacagaacagctaaaattgctttttttttttttggtctttaaaccagtgaaaaagaaaactcaagacaatgaggcagagccatccaccactgggcagtaatacattttatataaaacctgttcctgcttcttgatatgcaacttctttttttttttcttttttttgagacagagtcttgctctgttgccaaggctggagttctgtcacctaggctggagtgcattagcgcagtctcgactcactgcaacctctgcctcccaggtttaagcaatactcctgcctcagcctcctgagtagctgggactacaggcgcacaccaccacacctggctaatttttgtatttttagtagagatggggcttcatcatgttcgccaagttcgtctcgaactcctgacctcaggtgatccgccctcctcagccctccaaactgctgggattataggcatgagctaccgcacctggccttaatatggaacttctcatgctatcactctgcttacaggaagatagggttgggtaggccatatataacattgcagctttgtaaccagagtgttaatatataacaatcttaattttaaaattagcaatgttaaaaaggcatgttaaattcctaataatgaaaggcatatcacagtaaatataggactttacaacagaaaacaaaatgcctttatggaaaggatttatgaaagggctgaggctgctgaattatggatagatacaaagactggtaataatatcagaagtgccaggtggagaagcaggtgcaaactttgtatgaaatgtattcttgccagggatgagttgctctggctcattgtcttgcgttttacttttccctggtctaaaaagacttctagtttttgctactttgccatccttctttcataaagaaactgttgctgggcacagtggctcgcgcctgtaatcccagcactttgggaggccgaggcgggcagatcacaaggtcaggagatagagaccatcctggccaacatggtgaaaccccatctctactaaaaaatacaaagattagctaggcgtagtggcataggcctgtagtcccagctactcaggaggctgaggcaggagaattgcttgaacccacaaggtggaggttgtagtgagccaagatcgtgccactgcactccaacctgggcgacagagtgagactctgtcttaaaaaaaaaaaaaagtaaatgaaacaaaaagctggttctttgaaaagataaataaaactgttagaccattggcaagattaaccaagaaaagaagggagaaaatccaaataacctcactaagaaatgaaacaggagatattacaactgacactactgaaatacaaaagatcattcaaggctactatgaacaccttgacacacataaactagaaaacctagaagagatggacaaattcctggaaaaatacaaccctactagcttaaatcaggaagaattacataccctgaacaggtcaataacaagcagcaagatggaaatggtaatttaaaaattaccaacaaaaaaaattccatgaccagatggattcacagcagaattctaccagacattcaaagaagaattggtaccaatccttttgacactattctacaagatagaggaagaaggaaccctccctaatttattctgtgaagcccccatgaccctaataccaaaaccaggaaaggacataacaaaaaaaacaacaggccaatatccttgatgaacatagatgctaaaatccttaacaaaatactagctaatcaaatccaacaacatatcaaaaagataatcctccatgatcaagtgggtttcataccagggatgcagggatggtttaatgtatacaagtcagtaaatgtgatggaccacataaacagaattaaaaatcacatgatcatttcagtagatgcagaaaaagcattaaacaaaatccagcatccctttatgattaaaactctcagcaaaatcagcatacaagggacataccttaatgtaataaaagccatctatgacaaacccacagctaatgtaatactgaatggggaaaagttgaaagcattccctctgagaattggaacaagacaaggatgcccactctcaccactcctcttcaacatggtactggaagtcttagccagagcaatcagacaagagaagaaaagggcatccaaatcagtaaagaggaagtcaaaccgtcactctttgctgacaatatgattatttaccttgaaaatcctaaggacacctccagaaagctcctagaacttataaaagaattcagcaaagtttctggatacaagattaatgtacacaaatcagtagctcttctatacaccaacagcgaccaagcggagaatcaaaccaagaactcaacccctattacaacagctgcaaaattaaattaaaataaaataaaataagtaaaataaaataataaaatgaaatataaaataaaataaaatacttaggaatatacctaaccaaggagtcaaaagacctctacaagggatattacaaaacactgctgaaagaaatcataggctgggtgcagtggctcacacctgtaatcccagcaatttgggaggccaaggcgggcagatcatttgagttcaggagtttgagactagcctggccaacatggtgaaaccctgactctactaaaaatacaaaaattagctgggcatggtgatgtgcacctgtagtcccagatacttgggaggccgaggcaggagaatcgcttgaacctgggaggcggaagttgcagtgagccgagatcgcaccattgcactgcagcctgagcaacaagagtgagactacatcaaaaagaaaaaaaaaagagagaaaaagaaagaaagatagaaagaaagaaatcatagacaacatgaacaaatggaaacacatcccatgctcatggatgggtagagctgatactgcgaaacacatcccatactcatggatgggtagagttgatattgcgagaatgaccatactgccaaaagcaatctacagattcaatgcaatccccatcaaaataccaccattattcttcacagaattaaaaaaataattctaaaattcatgtggaaccaaaaaagagcccatatagccaaagcaagagtaagcaaaaagaacaaatctggaggcatcacactacctgatttcaaactatactataaggccatagtcaccaaaacagcatgttactggtacaaaaataggcatatagaccaatggaacagaatagagaacccagaaataaacccaaatacttacagccaactgatcttcgacaaatcaaacaaaaatataaagtggggaatggacacctttttcaacaaatggtgctgggataattcgctggccacatgtaggagaatgaaactggatcctcatctctcaccttatacaaaaatcaactcaagatggattaaggactttaagatctgaaactataaaaattctagaagattacatgggaaaaccccttctagacattggcttaggcaaggatttcatgaccaagaacccaaaagcaaatacgataaaacaaagataaatagcctggacctaattaaactaaagagcttttgcacagcaaaaggaatagcagagtaaacagacaaccacagagtgggagaaaatcttcacaatctatacatctgacaaaagactaatatccagaatctacaatgaactcaaacaaatcagtaagaaaaagtcccataaaaaagtgggctaaggacatgaatagacaattctcaaaagaaaatatacaaatggccaacaaacatatgaaaaaatgctgaacatcactaatgatcagggaaatgcaaatcaaaaccataatgcgatgccgccttactcctgtaagaatggccataatcaaaaaatcaaaaaacagtagatgctggcgtggatgtggtgatcaggaacacttctacactgctggtgtgaatgtaaactagtacagccgctatggaaaactaccatttgatccagcaattccactactgggtatctacccagaggaaaagaagtcattatttgaaaaagatacttgcacacgcatgtttatagcagcacaattcacaattgcaaagtcatggaaccaaccaaatgcccattaatcaatgattggataaagaaacggtggtgtgtatatatatgtgtgtgtgtgtgtgtgtgtgtatctatatatatctatttatatctacatctatatatctatgtgtgtgtgtgtatctatatatatctacatctatatatctacatctatatctgtatctatgatggaatactatgcagccataaaaaggaatgaattaacagcatttgcagtgacctagatgagactggacactattattctaagtgaagtaactcaggaatggaaaaccaaacattgtatgctctcactgatatgtggaagctaagctatgaggatgcaaaggcctaagaatgatacagtggactttggggacttggggggaagagtaggagggggcgagggatagaagactacaaatatggtacagagtatactgctcaggtgatgggtgcaccaaaatctcacaaatcaccaccaaagaactaactcatgtaaccaaataccacctaataccccaataacttatggaaaaataaataaacttaattaaaaaaaaaagtaagtggagctcactttcagttttatgggataatataggccctattggtaaataccttgcgttgtttgacatagcactgtcaatctaaactttttaccttttaaatttttgctgaggaaccgtccttgggatcccagcctagggatgagcgaaactctcctagtcctttaacagagttagaaacacttgccacttgttgaatctggtaggtgatagtacaggaaagctcctgtgcattctaggaaatatgtttaatgcttgttcagcctcaaaatgccctgatatgcaacatattattattcattgatattgctgaatattcactaaaaacattagttagaaattgggaagagtcacattttttgagtgctttggaatagtttgggttttaaaacagtgaatttctagtgcctgctatttaaagttatgtttgtggcagcatgtctttgtaaaatgttaagtttgctgaatacttggatttgttgctgtaaattcttatcatttgactctaatttggatgccctgttcacaatttgacaaactgtttctatcgtagaatttttaaaagcacagacttagagtcttgctttcagaatttgcttctttctcttttaagattcttaactaatgaagcaatgtggtttgattttctttaaacaggtgatgatgtaaaatctaaagattacattgttgcactacagcaccctgtgaccactgacattaagcattccataaaaatgtttgaattaacattggatgcacttatctcatttaacaagcggaccctagtcctgtttccaaatattgacgcaggtaattgaacttgaaaatgaaattatgccacctacttttcccaattttatgtttctattacttcttttaactgccttcctatcttgctcatcttatcattgaagggcactctattctgaaatgcattccaattttcaaaggattaccaattttgctataactcaaaaagtttgtaatgtttttgccaagtccagtagaaacttaataataaaaagtctgtctactgtctactttagtctcatgtttagtactaatattttccctccagtttccaccagttaagaaactgcagaagccaagagacataaatcttagaagttgaagtgaaagatggtcgggcacggtggctcatgcctgtaatcccagcactttgggaggccgaggcaggcagaacacttgaggtcaggagttcgagaccagcctggccaagatggtgaaaccctgtctctgctaaaatacaataattagccagccacagtggtgggcacctgtagtcccagctattcaggaggctgaggcaggagaatcacttgaacctggaaggtggaggttgcagtgagccgagatcatgccactgcacactagtctcagtgacagagtgagactccatctcaaaaaaaaaaaagttgaagtgaaagaatctctagaaaagtagtgattccactatccacagtaaaatagccactaatattttttcttgctttctttcatatttatgttagctataccttaaagtaatcttgagctgaagcagtttaaatctggagtccccagccagtcccaaccggttcatcctcaagcctgccctggctgatcacttgcttaccagtggatggtactatagattttggtactgctgagaccttaggcgagttaatgggggtgtgagatattaatgagaaatgtcagaacatagcctaacactgaagaatttccaaacactggttatctttagctgacaccactcattgttgagttcttaggcttttttttggtaaaggaggcagaacccattctctgcaatgtcaagatatcaccaacttactctgaaagaacccctgtcttagtattcccttgaagaatcttttctgttagggagaacaaagtaggatattagttggaaaaaaatttaagaatacccaacccagattttttccaggtaatgtatcaatatttcaaaaatgttaatatttattcttttctgacctttaaattttttataaatatgtgtaatgtaactatgtatcattctcgttcagcattcattgtcaatgatatattctgtttataatacactttcctggctgtatatactttagaattagaggtattttttttctatgaaagtaaagggtcccaggtatatctaagtcatggctgccacttgcctctaccctccacagggtttttgataagctatacacagggaacaataggaaaataagaatcaaggcatcactttatcattatctggcttagtgccctgttccccagtacaggactccctccggaaaatggattatcgaagccttaagccaaagaggggctttcaactgaatcgaaacctgaatcttggaatagtagtggtgccttctggtgtgccatgtactacagtttgagtatccctaatcaaaaaatctggaatctgaaatgctccaaaatctcaaactttttgagcaccaatatgacgctcaaaggaagcgtttattggagcagttggattttggatgttcagattggggatgctgatctggtaagtattacagaataacaaatatttcaaaatccaaaaaaacttgaaacccaaaatatttctggtcccaaccatgtcgaataagggatgctcaacctgtacaataattacagatgatgctctggcaagactgtatatagagagaagtggccaggccttctccagggaattagaccctgagtccatttacctaccttgcaacacaataaaagttaaaaaaattgagaaccatgcatgcacagctttggttaaatgagtggcacctgcccagtggtaagcatggtgtggtcagacctctgccttctaaccagtcaggttagcaattttcctccctaggtatggggtagttaggagggggtcagttgagaggcaagcagagggacattaaatattgcctccccttcatgtatctttaaatttttattaagtcatgcagttaaaatagaagccacagttatcagaatctatgtgtattttcttggagtttagttcatataaatgggagtgctatcccaccgagttcttgttagtgtaaaggtgagtgtagctgggcagaggctctctcatcagcttggtgtgtggagcctgagagggttccatttgggaactctcaggttaagagatacaggctgttggcctgtctttagcctcttaattgttgtttaaggtaaaggcttttactagggcattgataaaagttatttgctttgcctagttctgtttgaaaagtcccaactgctgctttttgagttcctagatgagtgaagcagaggacattttagatatccatcattcatgaaaaagccagtagttaaaattactatttccctaataactgatgtgaggtttttttagggagatttctttacgtgggctatacttgccaatgaaaatggtttctttatctcacaaaccatttaccaattggttcttttcattttcatagggagcaaagagatggttcgagtgatgcggaagaagggcattgagcatcatcccaactttcgtgcagttaaacacgtcccatttgaccagtttatacagttggttgcccatgctggctgtatgattgggaacagcagctgtggggttcgagaagttggagcttttggaacacctgtgatcaacctgggaacacgtcagattggaagagaaacaggtatttacctttgctcatacttcaactgactaggctttatacatacgtgagttgttataaggtatgcatatatcagtactgagcatatattttgtgaacaagtgagtgaatgaggttaataaccagttgaagcctaaaatctatagtcgataaatagcacacagtgattaccaaatattttagatctctacttacattttattgtctttgtaatatcaattagcactaagtggttctttctttttttttttttgagatggagtctcgctctgtcgcccaggctggggtgcagtagcgtgatctcggctcactgcaagctccgcctcccaggttcacgccattctcctgcctcaggctcccaagtagctgggactacaggcgtcagccaccaagcccggctaattttttgtattttttagtagagacggggtttcactttgttagccaggatggtctcaatctcctgacctcgtgatccgcccacctcggcctcccaaagtgctgggattacaggcgtgagccaccgcgcccagcctaagtggtttttaattatggtctttcatggctgtgtttaagagagaatgtggttgaatgtttcatgaatatatgaatgctagtcttttattttctgggcctaatgtagaatcccttcagtcagtactttagagtatggtagttctaagtaaagtgccccttaagtataagtaggattattattaatgaatttgctaactgagctaggtcctgttattaacattagttcaagttctaatcctgtttacatgcagtggaatttaatggaagctgtaatggaaaagtgtgtatcattaaaggaaaaagaactggactagaaccaaggagatgagttctagctctgctctttctccagttcttcataattgccacctttctgttatatttagatcttcttcccttctcattcccagcatattactttactccccacttcatagagaaaatggaagccatgagatggaaattctttcaaattcctcaattcatttatttagaaaatatttagtaaacacctaccatgtactaggcactgggatttggcaataaactagaccaagaagagctgggctctcgtgtaacttacattctagtgggagaggagatagatgatagacatacacaaaagaaataagaaaaatatcaggaattctatatgctgtgcctgctgtaacacaaggtatatgatggactccattagattggttaaaggaaggcctctttaaggagatgacacctaagctgaaatctgaatgacaaggagtcagctatgtgaggatcagggagaggcagtggcaacagccagtgtgagggccgggaggtgaacttggtgtatttgagaaatggaagcgctattgtggctgtagagtagtgagcaagaggcagagtgatacaggtgatgttagagaaggaaacagatgcatgtaagccagggtaagtcatttggaattttttctaagtgtaatgggaaggaatgacatgacaagagttgcattttggaaagatcactccggttgctaatatacagaatggaatgtcgggagggggggcgggggggcaagaataaaagcagggagaccagtaagggggctgattcagttgctcagatgagagatgatagtggctttgatgaagtattagagatggaaaaaagttagatttgggtcttgttatagtacttgctgatgcttggatgcggaggtgaaaggaatcaacaaggaagcctagatttctgattgggcagtgatatgctgggaatgagaagggaagaagatgtaaatataacagaaaggtggcaattatgaagaattggagaaagagcagagctagaactaatctccttggttctagtccagttctttttcctttaatgatacacacttttccattacagcctagatttctgattgggcagcgatatggggacactgagggaggaacagatttggggagggattgaattaagagttctcttatagctatgtgaagtttgagatgcctattagatatcaaagcagacatggctagtaaacagctagatagttccaggaagagttagagttggagatagaaatttgagagtcattggtatagagatgatgcataattggttgtcagtttggctgctataacagagaccctaaataatagtggctgaaataagttaaatgttctttctttctcagtggatggcagctccacaatcatcagacttagcccccatctattttcttagtggttgctctagctattgcttgcaagtctctgttttagcctttggaagaaggaaaagagaagatgcctttcactttaaaggcaagacctgaaagttgcaaatctttcttctcacatccatcagaacttagtcacatggccacatctggctgcaaggcaagctgaagaatatagtcttttttgtttgtttgtttgttttgtttttgtctgaaatgatactgttctgttgctcaggctggagtgcagtggtgtattcatagctcatcgtaaccttgaattcctgggctcaagttatcctctcactttagcctcctcagccatgcctggctaatgtttttacaaaatgttttgtagagacagggtcttgctttgttgtccaggcttgtcttaaactcctggtctcaagtgatccttcctaccttggcctcacaaagtcctggaattatggatgtgagccattgtgcccagtctgtgttttgtttgttttctttccttctttcttttccttccttccttccttctttcattgtctttctttctttctctttctctctctctctttctttcttttttttttttttttttagtgaagcagtgctgggggaggaggaactggttgtgatcaattagttgtaaacaccagccagaatataatctttggctggggatcagatgcctggctaaaaattctgtttctagtatgaagaaaagatattgaagataatggcaccagccatagatagtatttaaaacccaggccaggtgtggtggctcaacacctataatcccagtgctttgggaggccaaggtgggatgattgcttgaggctgggagttcgaccctagcttgggtcaagatagtgatattttatctctgcaaaaaaattttagcgtgaacccaggaggcggaacttgcagtgagccaagatcgcgccactgcactccagcctgggcaacagagcgagactccgtctcaaaaaaaaaaaaaaaaagatagtgatattttctctctacaaaaaaattttaaaattaggtggacctggtagcatgcgcctgtggtcctagttactcaggaggctgaggcgggaggatcacttgagcccaggagtttgttacagtgagctatgatcgtgccactacactccagccagggtgacagagcaagactccgtctcaaaaaaaaaaagacttgtaaatagggcagagaatggagcccaggaccaacctctggagcccttcaatctttagagttctggtgaagagggaagggccagcaaggaagactgaagaggaacaccagtgaggttggagggaaacaaggagagtgtgctatctataaagcccccaaaataaaatgttttaaggatggggtggtggatactgctgagttcatttaagatgtgaaaggacagccatgcacagtggctcacgcctgtaatcctagcactttgggaggccaaggcaggtggatcacttgaggtcaggagttcaagccagcctggctaacatggtgaaacgccatctctaaaaatacaaaaattagccaagcgtggtggtacacgcctgcaatcccagctactcaggaggctgaggcaggagaatcgtttgaacctgggaggtagaggttgcagtgagctgagattgtgccactgcacttcagcctgggcaacagagcaagactttgtctcaaaaaaaaaaaagtgaaaggagaattgaaccatatgccaacatggtctctgtactttttgccactacacttaaataaacgtatataaatgtgcatgcccatccatcctttccttcttaccttttttatagcagggtgtgggcatgggtgtgggtgtgggtgtctctcctgcctgtctactgcccatccttctacctgtgttttcaatcccaaccactcctgccttctcagggacctatccatgagtgatcttttctcatccttctttatttaacctcctcatcatttaaacatgcctaagcctctcacatcttaaaaacaaacaacacaaaacaactcctttcttgaccccacacctctctccagatgttactcgtccactcttctcttcttagccaaacccattgaacagtgtggccattttcgctagatttactccctcatattggtcaggaaatgtctggagggaaagtgactgcctgaccagccaagtgaaccactggctgagtagatggaaggcagggcaggttgaaagagagtgaatctcatagatgactaggcaaatggtaagtggatgccaggttggtctaccttatttattttaataaacaaaaacttgatttgttctccttgggaataaaggaccctagggcccttaagtgtttgatgtactgaaatcttgccaagagtactttaaaaggtataaagtagaaaagttgaattttccctaacaaaagacttaacctgaagtcagctggatttcaggtctaattatgagcatagtacactgataatttctttattctttggatattcccacttccaaatccttgtaatgtgtcactggttttacctaggggagaatgttcttcatgtccgggatgctgacacccaagacaaaatattgcaagcactgcaccttcagtttggtaaacagtacccttggtgagtataaaacattctttgttgagtgatttaaaaggggagctaccttcagtaccattttaaagctacaatcactgtttaatcatcctaacagagctttccttcttatgcctacgggcccctagttgctggggagacagggattgctaatatcatacccattattactgttccaaaggttccaatgtagaatacatattttatttcttttttttttttttttttttgagatggactcttgatctgttgcccaggatagagtgcagtggcgccatctcagctcactgcaacctccgcctcctgggttcaagcaattctcctgtctcagcctcccaagtagctgggattacaggtgcgcaccaccacgcctggctaatttttgtatttttagtagagatggggtttcaccatgttgggcaagctggtctcaaaactcctgacctcaggtgatccgcctgcctcagcctcccaaagcgctgggattacaggtgtgagtcactgcgcccagccttattttatttgtttctcttaattaatacaacacttttgctacacttatttaaccttctttggctttctataaatattagaaaataatgtaactgattttttttaaaaagtctagttcagctttttaattaattttgaccaccctcctttctgtttcaaatcgatgagatttccctgtatttgaatatttctttctgaaaataattttgttttctcagaaatataaagataaaaactaaaaaaagcaaaaaaatacaggcacttagttacaatgttgctgaagagatctagatattattttatataaaatttttttagttctgtataattatgatttatagtttttaacttttaattgacagataaaattgtatgtatttattgtgtacaacatgatgttctgaagtatgtatatcttgtggagatgttattttatttcttttttgttattgttggttgtttttttttttttttttttgagacggagtcttgctctgtcatccaggctggagtgcagtggtgcgatctcgactcactgcaacctccgcttcccgggttcaagcagttctcctgcctcaacctcctgagtagctgggattacaggcacccacaacgcctggctaatttttgtgtttttagtagagatggggtttcaccgtgttggccaggctgatcttgaactcctgacttcaggtgatccgccagcctcgacctcccaaagtgctaggattacaggtatgagccactgcacccagcctatttatttctttaaacatgatttttaaaattactttttgtagagatagagttgctatgtctgtgttgcccaggctggtctcaaactcttgggctcaagcaatcttcctgcctcagccccccaaagtgctgggattacaggtgtgagccactgtgcacggcaggaagatgtcactttaggaagaagcatgaattatttttacctgaagtctcagtttccattacattataccctcactaccacttaacatgtatggcagaagcatataatttaattgactttttgtatattgcagttcaaagatatatggggatggaaatgctgttccaaggattttgaagtttctcaaatctatcgatcttcaagagccactgcaaaagaaattctgctttcctcctgtgaaggagaatatctctcaagatattgaccatattcttgaaactctaagtgccttggccgttgatcttggcgggacgaacctccgagttgcaatagtcagcatgaaggtaaaataactcctaaactcctaactttatatcccatatgagcgattgattttttttttaagtatatatagttggaaggtaagactagaaacatacacaagagcttgtaatcatttgctgatagtattgacttgtggatcctttacaatgtttgtctcactattttactgatcattaacatttcaaagaagtaaattctttgggaatccaagacggtagacttgacagtgggaagacccctttaggcatcagatcgggcttttgccacccaaaagacctgaaattctatacttggtaacagcttggagtgtggagtatgctgattactatcactgcccaggtgaggggtatcagcaaatggtgaagggagctgcctcttctctagaatgtgatcagttgtgtggattttccattttgcatttttacagttctgctctttattgagtacagcataccttcaatctgttaaccaaaccatcacccagtgttgacaggtgagagaacattcataaaaataacaaactgttcatgttaaagtgatctctaatgacttagaataaacctactagaaaaatcttggtttgaaatagtgtgagtgtataaagcttccagagacgatgagaaatagcaaagattttaaatgtaaagttgtaggaaatttattaataccattaggtcaaataaggaaagcaaaacaaaacataattttctcaagaaaagccaagaggcctcccttataaatactcttttaaaaactaatagaaggctggatgcagtggcttacgcctgtaatcccagcactttgggaagtccaggtgggcagatcacttaaggtcaggagtttcagaccagcttggacaacatggtgaaaccctgtttctactaaaaatacaaaaaaaaaaaaaaaattagctgggcatggtggcaggcacctgtaatcccagctacttgggaggctgaggcaggagaatcgcttgaacccaggaggtggagattacagtgagccaagatcgcaccactgcactccagcctgggcaacagagtgagactccatctcaaaaaacaaaacaaaaactaatagaagaatagtttcttaacagaaagatgatttattccatatgaaaggccaacatctttttcaatggtgaaattctagaggcattcccattgaaatcaagaagaaaagaaagatgttttgtgcagcattatctcacataattttggaagttatgagggaataaaggaaggaatagcaaaaatggagattattgatagggtaaaacaaaaaacattattaatagacaaaaaaatgcttggctcccaccctggactggttaaattagagtctctggggatgggggccaggcatcgctcttcgttaaaagctgtccaggtgattctgatgcacagcgaagattgagaagcactactctagattttttattctcttaatttaaaaaaatttttttttagagacaaggtcttcctatgtttcccagactggactcaaggtcctgggcttaaatggtcctctgcctcagcctcccaagtataatagctaggaccacaggcacatgccactgtgcccagctctagatgtatttttgttttttgagactgagtcttgctctgtcgcccaggctggagtgcagtggcgtgatctcggctcactgcaacctctgcctcccgggctcaagtgatttttgtgcttcagcctcctgagtagatgggactacaggcttatgccagcatgcctggctaatttttgtattttttgtagagacagtggttcaccatgttgcccaggctggtcttgaactcctgggctcaagggatctgccagcctcgacctcccaaagtgctgggattacaggtgtgagcgaccgtgcctgacctagatttatttttaatgacaatcctagtgacagctctaaccctatatttgagatataaaaatccactaataacaaaataatataaatggaaagagagatcttattcagaacaacaacaaaaactcctaagaataactgaaaccaggaacgatgtaatctatataaagaaaattctaaaactttactgtaagacataaagtcttgaaaaaaatgccctggatggaagtgctgattatttttaagatgtcagtgttttcccaatttgatttataagatcaacataatctagtaaatatttcaatggtatttgttttacatttagtaaaattattgtaaatcacagtggaatttctcaaagtttaacattaaaagtacaaaagtcagttgtgcaaagaaaaaagataaagacaagtaatcaggagggactatccctgtttggtattaaaacatatcaaaaagcacagtaatgtgttttatttttttgagacagggtttcactctgtcgcccagactggagtgcagtggtatgatctcggcttactgcaacctctgcttcctgggttcaagcgattctccagcctcagcctctcaagtagctgagactacaggcgtgtgccaccacgcccagctaatttttgtattttttatagagatgggatttcctcttattgcgcaggctggtcttgaactcctgaggtcaaagtgatctacctgcctcggcctctcaaagtgctgggattacaggcgtgagccaccacggccggccatataataatttaaacaatgtggtatttctgccagccaggatggaaatttaccctaaggaaatagagtatccagaccatcactgaattcagttacaggagatgattaaagctcagctacttagttgcctcagtgtttttttgtttttgtttttgagaaagggtctcactctgttgcccaggctggagtgcagtggcgtgatctcagctcaccgcagcctgaacttcccaggctcaagaaatcctcccagcttagcctcccaagtagttgggactacaggcatgtgccaacatgcctggctaattttttgtagagaggaggtctcactgtacctcccaggctggttttaaactcctgggcccaagcgattctcccgccttggcctcccaaagtgccgggattacaggcgtgagccactatgcccggtcacctcagtaagcaagaaagttttgtcaacctgaaagagtaaactatggtcttttaatgaactaggctcaaattagcgaacattgaacttaagcttaagaaaggggcccggccgggggcagtggctcacgcctgtaatcccagcactttgggaggccgaggcaggcggattgcttgaggtcaggagtttgagaccagcctgggcagcatggtgaaaccccatctctactaaaaatacaaaaattagccgggcgtggtggcaggcacctgtaatcccagctacctgggaagctgaggaaggagaatcgcctgaacctgggaggtggaggttgcagtgagctgagatcgcgccatagcgctccagcctgggcaacagagcgagaggccatctcaaaaaaaaaaaaaagagaggggcccatcttgctgcctgtggagttgtcattgcttcaacagccccatattaggacagattacaggaactacttgagcttaccccagggctggcccagaccaggcagtgggtccttccccaagcagtcatctaagactgcggggccatcctatagcagtgtctaatttgtcatgaaaaagatcacaacactcacaatatgctgcttagctaagaccagtaagacggaacttgttgttttctcttttagggtgaaatagttaagaagtatactcagttcaatcctaaaacctatgaagagaggattaatttaatcctacagatgtgtgtggaagctgcagcagaagctgtaaaactgaactgcagaattttgggagtaggtaagattgtaaattataaatccaagaaatgctcattttaatgtacaaaatttactaacttgtgatgcatgcctgagcatcaagtcagtgtctgccctgtgcatagatggctctaggtgctgtctgtgggccccaagcatggggacttcctgggacaccaacaagcattaggagagaagcactgacagttctagaaatctttaaggtgctatggctttaattcacaactgtctaatatttccttgcagtccttggtaacgtttgtcttaggagatctggggtgaatgaatctgtgttcttaagacaagaaagtcagcatactttcctgagattgctcatcagcattatttccttgtgtttgtggtggagcgcaggcatttccacaggtggccgtgtaaatcctcgggaaggaattgtgctgcattcaaccaaactgatccaagagtggaactctgtggaccttaggacccccctttctgacactttgcatctccctgtgtgggtagacaatgatggcaactgtgctgccctggcggaaaggaaatttggccaaggaaagggactggaaaactttgttacacttatcacaggcacaggtaagaggggtagggggaggttggttcaggagctagaatgtatattggagcatgtcttcaacatggtcaggtggttacaactctgccttagccttcacttcctgcatgactagagcctgaaggtgagccacatgtggccttttctgagcatgtgcccagccttagacatgcctgtggccttctaaattccaggaacttgtcagagctattcaaagctcttatttcccagagcttctcatttcccagcttttcctcccagtctttttggttagtgtgttggatgccccagctgttatcctttgccctagacagcacagactaatacattttaccttgaaatgtttttttttttttttttgagacggagtctcgctctgtcgcccaggctggagtgcagtggcgggatctcggctcactgcaagctccgcctcctgggttcacgccattctcctgcctcagcctcccaagtagctgggactacaggcgcccgccactacgcccggctaattttttgtattttttagtagagacggggtttcaccgttttagccgggatggtctcgatctcctgacctcgtgatccgcccgcctcggcctcccaaagtgctgggattacaggcgtgagccaccgcgcccggccgaaatgtttttgataaacatccttcatgtaaccccctcagcactaggatagttcctagttagttaagatgaaagcaggccctttgaggtggtcctccagggaggtgacaggcaggtcaaaacaaacaaccacaattttttgaaaataagttcgtcctgccccgtcaggtactggtatccagtactgtttctgtacaccagtactgggagtgtggactgttgttcaaggtcaccaccaagctggagagtgggtgatgggaccagggtaggttacaacaccagaaagttctcttatcaagattcagctggttttgttttgtttttagacagggtctcaccatgttgcccaggctggtcttaaactgctgggctcgagggatcctcctgccttggtctcccaaagtgctgggattacaggcatgacccactgcacctggccctggtttttgtttttcttttttaaattaagcattcctctgtttgttgcaaactttggttagtttccagagttccaaaaaggttgattctgacatttttaccagttttttcctcactttagtggcagaatggacctttggagttccctgctctgtcatttttttatgacatcccaatttgttacttttgtttttttactctattttatttttgttgtatatattttaagtgtataacttgatttttaaatgaggaaacagacttagctaataagcggttaagccagcatctgatacagatatgtctaacttcaaaacttgtatgtgcttaaactctacattacaccactatccctttaagctcatgtacttatttatttatttatttaaagagtgagtctcactctgtcacccaggctggagtgcagtcgcacaatctcagctcactgcctcccagattcaagtgattcccctgcctcagcctcccaaatggctgagattacaggaatgtgccaccacacccggctaatttctgtatttttagtagagacaaggtttcaccacgttggtcaggctggtcttgaacttctggcttcaggtgatctgcccgcctcagcctcccaaagtgctgggattacaggggtgagccaccacacccagcctaagctcatgtactttagctcatgctcatcctcttttagttccagacacagttttagcaaacttggataccatttcctggctcagagcagtgactaagctgtaaatcagagggctaggggttgaggaataagtgcccaagaagtgacagatggcaagacaacccttaaaagcagagccttctcaggcacaataccctttactcctttgtaactgctaaacgccataacaaaagacagtcactgatatttataattattgaatcacagatttttagacatggcagcatcaaaaaaggcaaaatcattatttcatattttctgcttcaggaagcaggtagtgtgtgatacattttaaaagacttatcttgggtattcctcagagcagagcctgagacaaggatttaggtacaggtatggttttttggaggtgaccacaagaagcaggagggtgagtgggaagaatgaaacagagcaggaagaaagccattaaggatatattaacattattgaagttgacttgagggcaaagggggctgaactccactagcacctcctaagaagcctgcagaacagcatccagaattgtcctgtggatctgccggctcctgccttgcctcggttgcaggttgcccctgggtgctgtgcctgcgtggctgagtaggctcttgcttcagtgttagagaaagccttggtgcagaaagatggacagtgtgtgctgggccagggggtctgctacccacaaggtgggcatgcatttttgctgcactgtccccacagctgtgtttgaaatcacagtgacccaagcagatgggtcacagggcatcagaggatctgctaaaaacatttccatccaaaatgctgccagagaatgctttgatgcctagtgggcttcagctgtctaaagaagtatctatagaccctcacatgccaaagctctgctaaatagatgaggcgttgtgatatcatagttttctgtttcaggtaaagcaccctcagtgatttctatccctcgctgtaggaatcggtggtggaattatccatcagcatgaattgatccacggaagctccttctgtgctgcagaactgggccaccttgttgtgtctctggatgggcctgattgttcctgtggaagccatgggtgcattgaagcatacgcctctggaatggccttgcagagggaggcaaaaaagctccatgatggttggtgtccctctctcgaggaattaagtaaccaaatagtagacaagtacttcaaagtggaaattccaaagacagctgaacactgaagccagaagtttcccccttttcacttcttagggaaagagcagggctccctcgcactaaaactgcacagtcttcttggctgacccatattgccactcttcctccccaggggtggtggtggacagaggtctagagttccaagacagcagggaagatttccttcagttttgttttctcagccagtatcacagggagggtacttaatacacattttaatgaagaaataaatggacaaaacatgttatgtatatatcacacatacatgcactgtatgtgtagtatatctgtgcttcatacataaaaacagtgtagatttttggcccccaaaaccaatttgtgagcatatgctgaaggaaaagagatggggagtggaggccgagagtgcaggagagaagtgtatagagccctacagtagggttctgaagaggtgggaagagatgagctgcaaagccaggcagagggtccacgagagggcatggcgagccgagatgatgggtgtatgggacaggaagcaaaaaggtaggggatcactgcctggtggtgccccctatgagagaggtaagaagtatgctcgtctgttggcagtgggggtagaaggactgggaaggtggtgaaggtatagaaaagcgcagtcagagagaatgggtgagagctgtgagggcccaggggagacaggagaccaccagttgatgtctaggttgcagtttgcacagctggggatttttctccttcagggtccagatattctagcagattagtaggaggcagattgatctgagttggtgacgggcagaagacaaggactacagataaccacagaaatacctgctgcttactgagcatttactgtggccagcacttaactaaatactttatgtccatgatctcattccgttcctcaaataaccctgccaggggaggcactactggtctcatcttctaggaaggaggaatgtgtacaggtgaggtgacaggcatggggtcatgcagctgggagtggcagagctggcactgaccccaggcctgtgtctgttcctcagccactgtgcctcgctgccatagaacgcgtggcgctggcagatggcacagcattgtgtctgggatgagtaaggaaggagtgaatgtgggaggagggtgataatttggagaaaagaacacttcaaagactgtctgctactggaagtgagaagtgagggagccagaggggtaggaggctgtcgtcagacttgaggtttttccaggaagataggttctgggttatgtacaaccaattagcaagagggtagcaaaggctttaggggcagtgtatagagatgtttgtgaacgataagctttgcaattgtgaaaagaaaacaccgtcttcccatgtaggggcttgctttccacaggcccagtggtgagcttggcctccccacagctcattagtgactgcttttccttctcactctgttcagaggacctgctcttggtggaagggatgtcagtgccaaaagatgaggctgtgggtgcgctccatctcatccaagctgcgaaacttggcaatgcgaaggcccagagcatcctaagaacaggtgagcatgtggctgcaggtggctgtgctgcagggggtggcctcagatatcatatggcccagcccggccccagaagagaccctgcttccctagggacaggtgctttgcagtgtctgttcagaggtttctttcctaattactcagaggtaaaaagggaattggattcaaggtatttggcagcattgcctttttcagcaggtggttggtttggtttgacaactataaaaatgctcctttcattttacaggaaatttagagaaatataggacagttgtaagaaaaaatatcacttagttttcccatttggaggtatcaactattaacatttccttcgagtctttctattcatttttttgcctagtggagatcatgtggtacacccggctttttccacttgaggctgtcacatgatcattttctcatattaagaatcaaccgtgaactgcttttaaaacactgcctcccactgcatgccgtggatgttctttaacatttctgctgctggctcttttctgccttcctctttggtattttgattttggcttctctcagaaactcattttaatttttgtctccctatagctggaacagctttgggtcttggggttgtgaacatcctccataccatgaatccctcccttgtgatcctctccggagtcctggccagtcactatatccacattgtcaaagacgtcattcgccagcaggccttgtcctccgtgcaggacgtggatgtggtggtttcggatttggttgaccccgccctgctgggtgctgccagcatggttctggactacacaacacgcaggatctactagacctccaggaacagacatggaccttctctccagagctcctgagtggaatcaagttcttgtctttaggatgaccgtttcttaacaatcaaatctggtattgaactgcaggtgactttggcagagaaatgttttcacttttggtctcctcttccagagtcacctttccccactcctatttttgtagatgctattctttctgatgtcttcttactaggggtcattttagctcaaaccctgtaagttacagtcacaattttctgtgccaaagcagctacaataatagagaggaagccttcttagaactctgcttactaatgtattaataccactgagaccttcaggccttgcctgggatatcacttcatcctgaagtttgcattaataatccttccaggccgggcacagtggctcacgcctgtaatcccagcactttgggaggccgaggcgggcggatcacgaggtcaggagatcgagaccgccctggctaacatggtgaaacatggtgaaaccccgtctctactaaaaatacaaaaaattagctgggtgtggtggcgggtcccagctactcgggaggctgaggcaggagaatggcatgaaccagggaggcggagctggcagtgaactgagaccgcaccactgcactccagcctgggtgacagagcaagactccatctcaaaaataataataataaataataataataataataataataataataatccttccagctgggcgcagtggctcacgcctgtaatcccaacattttgggaggccgagatgggcggatcacctgaggtcaggagttcaagaccagcctggccaacatggtgaaaccccatctctactaaaatacaaaaattagccgggcgtggtggcatgtgcctgtagtcccagctactcgggaggctgaggcaggagaattgcttgaacccgggaggcggaggttgcagtgagccgagatcatgccactgcactccaccctgggtgacagagcgagactccgtctacacacacacacacacacacacacacatccttcctcctctaaccccaaactaagatcacagaaggtgatccagtcagagaacagagggaaatcttaccaggaagggcttaagtacacttttttttaaaacagctttattgtttttaaagcctacaatttgataagccttgacatatgtatacctgtgaaagcatcaccacaatcaagacactggacatatctatcactcccccatctcagatatcccccctaatcctggataccatttgttgaaagatgttattactctagctgaacttacaagagactttagaccagggatctaaattacagtggccttagtgaccttgtccttatcttcttaggacagctgagaagccactgggacttagagcctttaaaaggagattaactgtcccaaaaggatctttgctactgaccagcagacacttcttccttcagtagcctttcatactgtgttgagtaacaccctagggtgtccattaaagttttgagttttacctagagcccagagccatgaatcaggattctgtctacatgattcgtgttttcattggtgtcaaaatacaaaagccaaagttctggctatgaattgttaacttggaagaaatactaactgccaccacttattaagtgcctactgtgtgccaggctctgaactaggtgcttcatatacattatcctaaattatctcaacatatgaggtaggtgttttaatttttattttatagaacttggtgtgtttgactgttaagctatggggctagagagagggtttgatcccaggtccctctgtgcttttgctgctgagccacacaacctctcatttcaaaaacactttcaaaatgctaacatattctaattcactctaggccaccaaaaactttaatactaatatctgatttgtaaatgacttaatgtatccttgaccctatcagctgaatttaatgaaatattcctctctgctgtgaaattttaccagtatagtatttggtctagtgacaggtgttctatttttttgagacgggtctcactctgtcacccaggctggagtgcagtggctcaatgcaacctctgccccccaagttcaagtgattctcctgcctcagcctcttgagtagctgggattacaggcacatgcaccacgcccggctgatttttttttgtatttttagtagacagggtttcaccatgttggccaggctggtcttgaactcctgacctcaggtgatccgcccgcctctgcctcccaaagtgctgggattacaggtgtaagccatcacacctggccctagtgacaggtttttatgggtacttttagatgatctaagaaatcatgtgcatatatctttcagatttctattttgggaaaatgaaggtttctacaacatattgtttcagtgttcaaataaactgaaggactcaacattacatttgaactatatccttcctagtgggttagtgtgaaaaagagtttggctgattcctaaaactctgccagccctgcagtaatctccagggcctggttattgttcagacattccatggtgattcctgggaaggaagcttggctgctcagtttctgagtctggggtgagataatgttctgggaagggacatctgttctttggtgtaatctctcatggtgaaatctgctctgtacatcagacaattgcattgctaccaagtttcataccaaatatttgaaaggatggtattgaatctaaaaccaaatattagtttttattaaactcatgggaaggctaatatattccaacgtaaattattacatatggttaagtaattgcatgttaatttattttaatgtaaatatttttgttactgttctgagccaaattctaaagaaaaaataaatacatttccttgttgaaa

SEQ ID NO: 705 - DNA, 148990 bp, Homo sapiens
ggaaaaggcgccttgggagcgggcgctcggcggggcctcctcgggccccgggcgcggcgcggcgagtgggagcgagcgcgccaggaccacgcaggcgccctgctccggctggccctcggccggcgcgcggcgcgggagcagcccgcagcccgcctcccgcgcccccggcagccccctggcagcccgcagccgcccgtccggagcagcccctcggcagcccgcgcaggccgccggcccgggagagcgcgcggcggcggcggcggcgggacggccccgagcgcgccctcccgcctgcggccactcgcagccggcgctggccgggccggcgcgccccgcaggcggctagagcgcggcctcggcctcggcgcgggcttgccccgggccgtagcccgcgagaggcggcgcgggcggccgagggcactgacggcgtcgcgggacgctcccgggcggcggcgcagcggcagcggcagcggcagcggcagcgcagggggcggaggcagggggcgcccccagccaggatgctgcggttcctgcgccggacctttggccgccgctccatgcagcgctacgcgcggggcgcggcggggcgcggggccgccgggctgggggacgagcgcgatggggggccacgggggggcccggccgccgccgcctcctcctcggcgctgcccgccgcgcccgggggcagcgtgttcccggcgggcggcgggcccctgctcaccggcggcgcggccgtgcacatctccgccgccggcgccgccaaggccaccctctactgccgcgtcttcctgctcgacgggaccgaagtgagcgtggacctgccggtgagtgacggggccagtctggggcactggcacctcgcgcccctggaggcagctccccctcccccagtgcttgcatcgggggcgcttcccttgcacctccctggggatcccctcccccatcctcttctccgagcactcctcaaccctttttcttcttgggccaccccgtcccggtctcttccggggccccacctttggcccgtgccccctccttggcacattgcgccgcggggttgcgatttctctggcgcccacctagtccttggggcctcgccccctccccagtacacacggtccccaagtcccgagaccccgccccccctggtgtgggtggccggcgctccccttccgtccctagcttccagcaggggtcttcctgatactgggttattgggtagaaaatctcaaatcaatgtgaggccgtcctggggtgtccagcttgtcccccctcaaactcgccatcaggccttgatgagacagcagagaggagatcccctcgcttgctgctcggcaggcgccccaagtttgggaggcgggggttagaccatttctgctctctgctgatcccttctggatacaccccattcccattccctgagccccatctgccccgcagcctcctcgcagcgggtagggtgacttgggagctaactctagagtcggctgtctcagacctgcctgccttgcaccggcagagccctttgctggggcgctgggagtcgaccccggggtgcccggggggccaggcgcgcctgactttctcccttgggcaccgtgcgtggggtcggcggggcacctcagggcggcggcgcctgggcctgcgtcccgggcacccgcccacaggtggttgcacccccgccccgcgccagctgagagctgggccggcgctgcggtccgctgcagggcgtccagttaccagtgagtcttcctggctgaaggggccagatcagatcaaatcaaaccacacattaatcgggcgcccactgtgcacccggcgctgcggcagacggtgccttcgggaatttctgggtgtgactgaggacacagcggtaattgagctttagatgaatgttacagatcatctcgaggatgtcaagggaagaaataacatacccggacttccaaggaagtatataggccttcccgggtgggagaaatgtttggacttcatgagagaactaggaacatgtgaaaagggtctcagatgggaaaatcagagcctgcctggcttggagtttaacgcttcccggtgtaggctgaatttcgagacagtttcaatttatggcaattttatttttgtggttctttgtgctctccataagatatcattttgctatgaaaatacccttttggggcctttttattgatggaaaaggagccaacattcgggtgcttagagctgttgcctttaaaatagcataaaaatgttactgttccccaacaatgaggctctccagctttttattcagctgggagaggaggcctgaggagccggggaggaggagaggggagcaggctgcctctggagtgggcagcttgtgttaggagaggatgtggcgtagtttgcatctcggatctgggaaaggaatgctatccttgggaagtttgacagtgctccttgccggtggttttctcatctgttccctggggatgattcgtttataaaatgtattgcttgtcagctccatgagacaggcttaagtggtgtgcatggtgaatagacccaaacaggtacacaaacgaacaggttgggacaggaaggctgactgattccagccagtgtagccctcactggagcctggtgggggaaggggatatttgcatcctaaaaggtttcttcactttataaaaggctgcttgacaaaagaattcccctgtcccaggtattcccaggacggcaaatttcttgattcctctatgatgtgacttagtgaagcccacattgtatttatgcgcgtgcacacacacacacacacacacacacacacacgtatatgccccctgtccacaggcagataaaaagcaaatgctggcttgtgtcacgtgagctctcagggaggaaagatgaagaaaaatcgccagtgggcacagctcatcgatttaaagatttattagatattaggactgcatcacagtctcctacactaatcttcccagatctgagtgtgtgctcctgtaattaattctgagttacgaggttaacgccaggcggccagctccccaatgcatttgtagcatttgctgctcctcagacccacttcactgggctcactctttatgctgtcctttttgacatttggccctgcttgtcattattctcttttgtgttcctggatttttaccgcttcctgggccctggtgttgccttgctgcttgtcgcaagataggatttacctttgaccgtgataccccaagctggcttctcaggcacccagggacattgccaggctaaatgtctcctttgtaataaaaaccctcaggcggcgttagccttgagaattcctttgctcaacctcctaaaagttggctatgtgctgtcataaacctttttattagccctagttaggatgcttgtgttctgaaattgtctggaacacaataacaccctcagtgtgaccgtgctgtggcacctcagtccagtccagaccacagttattgggcgtctccaatgtgccaagctgtgtgctgcagacacaaaggtgaatgagatgtggcctggaggctcttgggaaacgcaggtgaaaacacgtttcttttattctgggtgatgctaagtgatatgactggcacacccagacagggtgctgtggccggatgggatgggggaatcggaaggacttccaggagactttgacacttgagattatggggtctcagatccagtgtcccttggcaaagccacaggccagttgttgtatataataaagagaaaagtagctgcaattgtttcttctgacagggcttggagcccccttctctggtgataggttgagtcacctagcatccctgagtgttcttttttttgttttgttttttggatatggggtctcatctgtcacccaggctggagtgcagtagtacgaccacagctcactacggtcttaatctcctagccgcaagcaatcctcccacctcagcctctctagtagctgggactgcggttgtgcaccactacacccggctaattaaaaaaattatttttatagacatggggtctcactgtattgccctggctggtctcaaacgtgtaggctcaagcgatcctcctgcctcagcccctaacagtgttgggattacaggcatgagccactgcgcttggcccctgggtgttcttagtctttgctatggatagtcagcagctttccagtctttgataaaataaaatgtgaataaaaggatctttttaaaaaaatctataacatgcagtctaaagtggacttgctgtacaaacccaacttccagatgagcccttgctcgccctaccaaccagagtgccagcctgagccagtcctcttcagaaaccctggccctgccttcgacagcacctccctctccttagcctagctcagccctgcccaaccctcaggtgtggtctggtcagagcagggcaggactccctccctcggcctgccctagacgctttccttctattaatgcagctgaagatcccattagtgtgcttggcagcggcacccactgttgactcatattagctctctgttgactaaatccctggcatcgcttttgctcgtgtggctgttgctcagccccgcctcccgttgccctgtgtgctcagtgtggaaagctgttaggatgtgcggtcggccagttagcactcccgccatgctttggagggaacggcccatgggccattgttgcatttggtgcacttgcctcccctgcatctggaactcaacattgactcattgtggtccagtgtaaacatggaggatttcagaattcgaagatctacctttgcatattgcaccctggctctgcagctttgggcaattgcagctctctgagccattgacttcctgatctttcaaatggggatgttgggaggatttggtgacgggaaggcctcatggtgcaacagagtgctgaaaggttgctagtaggttgtaatcttagaaacctctccttcctctactttgaactttggaaagatttgaagaagtttctagtaatagacattaaaaaaaaaaatgctgtgccaggcaggctaaccattgcttggctcttctttagtggaaattggaagttggatgtagtatgagaaatgctttttaaaagtttcactttggatgtgaaaagtgatgtttttttcagcaaaaacaggagaatccaggtttttagaattttaggactgaaacctctgatctcacataacatacatgatacaacataaaggtcatatggcttattttggagttgaaggggaccctggacagcacctccccggcccattggagaaactgggaagctgtggtctgtggctataaagtgacttcccttcagtcagtcagtgaaagagttggaaccggctgctttgggaaccctgattgtcagcgtctgaaggtgtcaagcgtagggtcagcagtgggagggaagactaaccccacgtcctaacacaggatcatggaagagggatggggtacattcctggcagttggaaatagaacagattttcccaaacagtggaaaaaatgatcccaacttcagtgttcacaaagttcatctgggattttttttcttccattaaaattcccagagcacaccccgagaatttcttgattcagtatatcaggaagctcaacttttaacaagttactccaggtgattctgatgcaggtggtctcttcacagccagtgaaaaaccctggccctagaactgtgagaacagaggcagctacaccatgcattataaactgctgtagcaatggggcgagcaataccattgctgtagcaatggtaggggggttggcagtctttgagctggggtttgacctgtactttagggagcccatttttgtcacagtggagtggagggctaggggagggactggagaccagtcatgccattgcatttgtcaggtaaggggtgatgagggcctggctaggagaagggggcaacggtagagcagctcacaggtggagttgggtgagtgtgttggggagggtgaaggtttgagatagagctgtcttcactcttggttgggaagaattaagggacccgcaggaggttgaagacagcttctcatttctaccctttcccaaggctctggctgccatgggcacactggcttatcccagggctctgggtggcttgctttttttgcccctgtagggtaggtattggctaaaggtggccttccactacttgccccacccacatcccctctcagacctggaatgaggccttggatatctagtgggtcatgagtttgtgttatttttggatatgccttctttgttttaaaagaaaggctgaggtgggggggggtgagagaggggtaatgaacacccttcccaaagggggtgtcgtgatacaagcaagagcactaactccccttctatacttgctggatttgtcagtgttaataaggggcgggggttggcctgcagggggaaggggccgcagcctagcctctccagtgccggtaacatgaccctacactggtacagggctctgaacaaatattaacttgctaagcactttcacgtgcataatctcattgaattctgttcctagtaccctgcagtggatgaaggcacaggtctgtttcgttttgaaatagcagaaggtcgatgggggtggggccttcccttaaattcttgcgtggggacttagaaaaaaatccagcctggcaaccacagaaatcctccgcctaccatttgtcctcaaaacacgtgttccatccttgcccactgcttgacttcctttggccggctgggagtgggctcctccccgggcctctctctgccctgcctggagccttctcctccagtgggaactgcactccagtttccacctgtagcccgtggctgctgcctgagggcagggtcagctgctgattcatctgggtgtgttttccaggttcgtgtgtgtgctctcctttcatttctcgtttacaatgcattcatcgaagacccatttgaaaatacacaaaggttggaacaacatctacagtttcattaaacactgttaaaataggggtgcgcattcatctgtgctttatttcatattcagatataaacatgtttttaaaatgatgaacttaagtgggttgatggaagtctctgtctactcccacctcagcacagttgaataaggatggtcgacttggagcttgtatctctttagggtgaggccctcggctctcctctctacatttcctgggactcttagctggggtggggagcccccagtgcttgttagccatctgcgctgtgtgctgcctgctgcccctcccttggtaggaagcaagctgcctggcactctgaccctcctcaccacaattactttctcttgctggcaggttaaaggtcttgttgatgtgacctcagagtccccttgcatctgaaagcagctgctatggggcagtctcgactctcgccagcccaggatgcctgtgactctgctaccagccagagctgacctggcagagtggggctggagccgggcagcatcctggtgtgcccccccaccaccctaatccctctaatctcactccttctgcagcctctgtggcctctctctagagctagattaattttactagtcccacctgattttaatttctggtttattttaaattgttttccaaaatgtttttgtttgctcacaatatgttttcttcagtcagcaaaggcttactgagcccttacactacattaagcatgggggaggggtatcggagagagaagagtgtttcttaagctcccagtcttgaggggcagacagagtaaacagatacccataaaccaacatggggtggtgccgggggtgagcaactgaagtgtgggctggagttggagaaggtttttttttctttttttggtaacattggggtctcactatattgcccaggctggcctggaacttctgccctcaggagatcctcccactgcggcctcccaaagctctgggattacacgtgtgagccaccacacccgggcagctggagaaggtttggtccccagagtgacaatggaattgccccaaaggatgtgtaggagttcagctgtgtctgggtggagggaacagcaggtggaaacgcgtggaagatgggggtcagaaaagccccatccctgggctccgggttccttggggtaggggattcagatgagttctggctgtatgcctggatcttaaaggagtgagtgagtgagttgcctttgaaatgaagatgatgtcgggaccccatctaggtgattatcttgttgaatcctcacaaaaactgtgttgatggttactgttgttattcctgatttgtagaggaaagaatcagggtttagcagacaggttaagaaacttgtccaaggtcacatagctagtaaaggcagactctagcttgatttgtggtctgggaaggtctctgacagcacagctgggcgaggggggtgggagggctctgagcttgccccagaggttccgagctggatggcgacccctgagcccccaaagggcttccacctttgtaggccacttgggatcagatttacttctttagttagactcattgaatgtcatttcactcgagtgcataatggtttgatggccataattcaacactcagatcagaagtaggtgatgtttttaaaaagtgcttagtagaacaacattaaaattatctcaaagaaaaacattttcatattcctatcctgctgcatagcaactggttggtttcactttgttcctttccatctttgtgcttttgtatacatgtttataagcgtggtgtatatcctttaaaacatttttttcttttctcctccccatccacatttcttgacaggcttctcaccagtttggtgccctcttttgtgtgtattctagaatacttaaattcaactcttattctctgctgtgtgtgatgtggtttgagtgagtaatacctgtctctgggggcttggaggttgatatgcaaagcacctgatcacttacgcgtcaggcagccccatctccaaggcatgcagaatctgtgttgcttcccttaatcactgccgcctgggaaggtgcacgttatcatcccctttgcagatggtctcggagagcagatggcctcgggccactctgctggtaagtatgggagagccagattgaatttaggtttccggactcattttccagtgctcttcccctcagcccatgctgtgcacacccagccttcctgtgttaaatgtgtgttctcttagaactccctgggaaggtcagaatttcatgcagtaaaatcccctgtcttttctgaaccactttgcctttcagcatctctggcatttggattctgtctaccatttctcagcattttttgcaggttcttttccccaaagtcatagctggctgagtgcccagcattttcttcatgaagccaagaactggaagatgatatcccaagggtcctgtcccacctgtgggatcatccggtgcttctttgttacccagctcagtccccccgggtggaatggtctaccctgcagctgtgaggatgccaactgcctggttcagcgggtgcctgcagagctggcatccctcagctctgtggtttcttttccatgcctgtctcatgagctgagtgttgtctgcagcatagcattcgctcaggtgcgttgaagtcagcctgataatgcatctcctttgctctacctgttcacttgctgagctgcacctaccctgaattatgaatttttttgaaaatcatggtattaatataaataacataaaatttactattttaaccgtgtttaagtgtatgcagttaagtggcatgatgtacattcacactgttttgcaaccttcaccaccattggtctccagacgtttttcatcttcccaaactgaaactcagtccccattaaacattaactccctattttcactccccccaaaccccgggcaaccaccattctacttttttgtctatgaatttagctactctaggtaccccatataagtggaatcctacagtatttgtccatttgtgctggcgtatttcacttagcctagtattctcaaggttcatccatgttgtatgtagcaggtgccagaacttcattcctttctaacgctgagtaatgttctcttgtaagagtataccacgtacagtttatccattcatggattgtggatgtttatgcaggtctggaccgtcttaactcggtcctacccattcacttgtggcactgccaccagagacttggatgtccccagccctcacctcgtggtgttattcttggattctgacacctcttccctgggactcttctgcatcatgctgatcatcttccaaggctgtctgggcttcgtttgggggtgtgtggcaggcaagttttctcccccttacatttttgtctgagttgcgcagtgttggcaagccctctgtccagcacattctttagatttttaaatgatgaaatataaatacaaaagactctctataacatgaatagttttagagaaataacacaatgaacatccttgtgcccaccaccgagcttaggaacaaagaccatcaccaatgctgtgaaagtccccacatgctctgtctcagtcacattcccctccctccctccctcctgaagtttgtctttcatccctttcttttctttataggttctctgcatgtgtacgttttcctaaacaatatcatgttagttttgcaggtttgtgagctgtatatacatgaatttttccttcaatattgtgtctgtgagaatttgtgtcagtgagatgactggagttcttactgttttgtagttattccattgcatgcatatactggaattgatcctgtgtggacatttgggatgttttcactttggaactattagggaaaaaaaacaccgctttgaactttctggaattggtctctggtgtacatgtgccaggaagcatctatcctgggtgtgtacctgggaggaagagtgggcggggccctttataatcatacaaaattgttttccagagtccccacagcatgtaaaagcttccctaatccattcttctccaacacttggcattgtcagcttctttgtttgattttaccaggatagtgggagttagtggcacctttgtagtctctaccttcccccagttgttgatggggttgagtacctttcacctatccatctctctctctctctctctctctctctctctctctgtgtgtgtatttcttaataatagagatgggatctggttgtgttgcctaggccattctcagactcctggcctcaagcaattctcccatctcagcctcccaaagtgctggcattataggcatgagctgctgcatctggccagggttgagtgtctttcatatgttgttagcaatgtgtagttcttcctggaatgttttgttttatgattttcacatgtgtttttaggtggagttgtatttttctcactggcctctggactccatgagattgtctcccgtatcccgttccgcttctgaggtcacctcggtggaataagggagcgaacactgtaagccccaagttgacaagcttccctggcaggtctttcctcactaagtaggaattaatgttttgatttcacttttcactgtgaatgagctgaagttggttgctgctggtggctttttgtgagagcaactacgggatctatagtattcacatcagctctgcccactctttttgaagtttttattatggaattttctaagcatattccagagtagcgagaactatatatggaccctaagtagtcatcttcatttccgtacttatcagtttgtggccactctccttttatacccctccctactgccctttcctgattattttaaacaaattctaaacatgtaattttttttttttaaaagacggaatctcgcttcgtcacctaggctggagtgcagtgcgtgatcttggttccctgcaacctctggctccaggattcaagtgattctcctgcctcagcttcctgaatagctgggattacaggcatgcgccaccacgcgctaattttttgtatttttagtagagacagggtttcaccatgttggccaggctggtcttgatatcctgacttcaagcgatccgcctgcctcagcctcccaaagtgctgagattacaggcatgagtctccgtgcctggcctaaacatttaatttcaaacatgtatttcagtaggtatctctaaaagataaggaccagttttaaaaaaatagagttgattgtgatagcacacacctgtaatcccagcgacttgggaggctgagatgggaggatcacttgagtccaggaatccgaggccagcctgggcaacatcacaagacttcatcaagacttctaaaaataatgaacaattattttttagtgtcagatattcggccaatgttcaaattttcttctgtggttttcagcaaggttctttcattgcatttgatagatattctatctaagactcttaacctaaaaaccttctcttcacctttttgagccatttatctgttggagaagtgaggccgtttgtcctattacagtttgttactttccgagttttgttgattgcatcctcaacattggtcacccctgaggtacagttagtaccgggaatggtcttatttcaagcatctgatcagagcacacagagatcagtaagatccttatcctcaagaaggctgagtggagatcagctgttgaatgtcttcctcgagtgtgggttcttcctccctctagctcactcctgcttgggtccccttcacatactcgggaggccctccatgaacccattctgtctctcctggctggagatgccagcagacattttagggaatgcagaatcaatgagaagggaattgggccgagtgtgggacagcttgaaccagtggggttcgcctctgagggaaccgttggagaacacctggtccaaaatctcattctggaggcggcgaaaggcctttcccatctgccttggaaggctgctcactccagtctgctgctgctcaccgtggcaaatgagcagtaacaagggtgtaacaagtgtagcttcctgcacgtagccccccagcgcttatgagcgacatccagcgagcctctttgcccctctgagactctgccatctcttctgaaagcgaccagggttctcaaccctggcacatgagagctggggctttctccagctctcctgcccatgtgatggatgtgggcatcatccagggaaggccggtagactgtaaaagcctaccggggttagttattaacctgcagcgcactcttgacagcccattccatggcatttcaccgactggagtccttttattgctcttgcctgctggggcctgagacccaaggcccatatcacctctgctcagtcggttacaatctgtattgagtggcatcagcactgctttgatggtagcaagaatggctggttaaagtccagggaggggcccaagctggcttggaactggcccaggtcatgcacacagccagcagtgacacatccaatgggacactccaggatgaaacctgagaaaggaggtctgggatatgggatattgtaatgggagagcaggaaatttaaggtcggaggtatttgtttaggatacctcagtattctagagctatgggatttattttgctttgaagtccagaggtatttagctttattctaaaagcgatgaagttcctcttaattaaagacgctcctggaaaaaaaaaaaggaaaaatttaatgctgtcttttaaaagggaaaggattgtatgtactataatagaattactgtaacatgtcgtttattaactcgcttcagggaatgagctcttccacataggtaagttttccagatagttacagttgcatccatttactgacaagaactgttttatttcagctatttcatttatttcttgaagaaaaaaaaaaaaaaaaaaacaactgcagcacatctagtgtctgtaaggccctgtgggaggaatacaaaatggtcaaatgtatgggcgttgctctaaaggagctcatttagggtggggtgtggatgttaactgcattaccttgactttgccttggtggcccccagtggattcttgggtcagctctgtatagtgttccagccttcaaagcattgctttactctgccttttcgaaggctggctgattaataagttaatacaacagtggtttttgatgtttactgcatgcttagaatcttctggggagtttttcaaagtccagcttctaagctataccccagactactgccaccaagattgatgggcttgggaggtgggaccccttcaccagaatgtttttttgtttgtttgtttgtttgtttgtttgtttttttgctcgctctgttgcccaggctggagtgcagtggcacgatcttggctcactgcaacctccgcctcccaggttcaagctatcctcctgcctcagctcccccgtagctgggattacaggcgcctaccaccatgcctggctaatttttgtatttttaatagagacggggttttgccatattgggcaggctggtctcaaactcctgacctcaggtgatccatccccacctcggcctcccaaagtgctggggttacaggcgtgagccaccacgcctggcccagaatgttttaaaactccccaggtgattctgaggtgcagtcaggtttgagaaacaatgttttacagggctccttcccttccttttgtgtggtgttgtaggtttagatcaggctttcacctttgatcatttcatttaatccttatagcatttactcgagagaattttgggtgttctaattttatagaaagctcaccagtaagattttggccccatatcccacagctagtaaatacaaaactagacttaaaagtcatttccaggctgttcaagtccacttctccagtttttcttcacggctgtcactctagtggctctctggcagctccccagtgtccccttcacttctcacctgtgtatctgtacctgtgccttatttttttaatttaatttaattatatttttttgagacagagtctcgctctgccacccaggctggactgcagtggcgcgatctcgactcactgcaagctctacctcccgcattcaagcgattctgctgcctcagcctcccaagtagctggaattataggcactgggtcaccatgcccagctaatttttgtatttttagtaaagacggggtttcaccatgttgaccaggctggtcttgaactcccgacctcaggtgatccgcccaccgcagcctcccaaagtgctaggattacaggtgtgaaccaccacgcctggccttttatttttattttgattttttgagacagagtctccctctttcgcccaggatggagtgcagtggcgcagtctccacttactgcaacctcctcctcctgggttcaagtgattctcctgcctcagcctcccgagtagttgggattacaggcacccgccaccacacccagctaattttgtatttttagtagagaccgggtttcaccatgtgagccaggctggtcttgaactcctgaccacaagtgatccacccgctttggcctcccaaagtgctgggattacaggcctgggccacctcatccggcctgtgctgccttcgtattggctgattcttatcccttaagggcctagccatctttcagggcctgtctcagatgatgccacatttatgaagcttatcccatcattccccccatcctcccaccccaccaccccaccttcccgcgcttcttccacttctcccatatagcattccctctcctcctaggagcttgcagggcatttttttgccttgggtgggacctagcacatgttatagtaattatgtagtaattcaagcaatagatggcattattgacctttttagtttttgcaagtgatttttaaaattgtggtaaaatatacgtgacacaaaatcgaccattagtgacatttagtacgctgacattgttgagaaaccatcattactatctggctctggaatattgtcatcaccccaaaaggaaaccctctacctgttgagccgtcattcctcccctgttcctaaccccgacagccgctaatctgtcttctgtctctctggatttgctgtccctgggtatttcatataaatagaatcatgcaatatgtggcattttatgtctggcttctttcactcagcattatgttttcaaagtggattgaccatttacattgttccaagccctttccatggcttcactctgacccctcatccccccatggagtaggcagttcctattggtatcctcattatataggagattgaggcacacagagatcaggcaactaggagagaacacacagtgcctaagtactcttggcccctgcactgtcctgctggtgtctgctgttgactttgacctttagaagggcaaagatgaaacatcaaggaagaattcatctatggtataagaacaacatatgatacggctccaggagcagaaatcattagaggtgcccctcgggactgcagaacagaattcctggggttgattgtgcgcttaaagctcttggtttaattggagtgaatcagtattgctgtgaatttccctcaaatgttaggggtcaagtataggattgtatatctagtattggaagccagctggcgttctaagaccactgaaatgttgaggaatgagtcttaaggactcagaaaggcagaggtaccccaagtaaaggtttcttttcaaagtagtgcttactatgtgccagacacagttctgagcactttatgtatctttacttggttaattctcacaaaatctttacaaggtagctactgccctgttttatggataaggaagcagaagtgcaaaacagttaaattacctcatcaaggtcttgccactagaatgtggtggacccagggagtctggttccggcatccatctgcttcattcttttccctttaaaaattttaattttctttttttggttataacatacctttcccaagacagtgagaacagaacagcctagttgcttgaataggaagagaaaaagggaaaaaacataatgggaaaagcactgattttattttattttttataaaacttatccggtcatatcagttctgtgcctttaaaaaaaaataaaaggctgggtgtggtggttcacaaccataatcctagcatttagggagaccaaggtgggaggagtgcttgagcccaggagttcgagaccagcctgggcaacattgcaagagaccccttctccacaaaaagaaaagaaaagaaaagaaaaaaaacccagccaggcatggtggctcacacctgtgatcccagtactttaggaggctgaggtaggtggattgcttaagcctgggagtttgagaccagcctgggaaacttggtgaaaccctatctctacaaaaaacaaaaacaaaaaaaaccagccaggtgcgatggcgtgcacctgtaatcccagctacttgggaggctgaggtgggaggattgcttgagtctgggaggtggaggttgcagtgagtcgagatcgcgccactgcaccccagcctgggagacagagcaagatgctgtctcaaaacccgccccccaaaagaaacccacaacttataaaaataaaagtaatacatgtttatttgataatgtttaggaattattgattaaagaatttaaaaattgttttttttttatttatcactttcaccaagtgatcaccacttcattaacattttggtgtatattcttgcctctttttttctaagtatggagaaaaaagttttttcaacaaaaatgggatcatactatgtataccctttttttacccctttttttcttttcttttctcttttttttttttttagagatggggtctcagtcagtcacccaggctagagtacattggcatggtcgtggctcactgcagcccagaactcctgggcttgagtgatcctcccacctcagcctcttgagtagctgggactgcaggcgcatgctactgcacccagcttcttttttttaattgtgataaaatgtaagcttaatctttatattacactgtctcttatgtttgaggaaaagcttagggacatctggttctcttcatgggaaggagaaatcttatctttgcagccagggaggcagctgcaccctggtacagaaggatccagaaaggccatgctgtgagaaggcacattactgggcctttatgactcgtcataggaccgaagttggccagcaagctctaagatcctgtggagaacgttggatcttcgggtgtgttcttagtcctcatatagtcccctaggtcaggatacctcagtatcctgacagggatgacatccctgtcagtcatggcagagcaggttctgcagttccaacttggctaaggaggtagctgtttggggctgaattgtggccccctccattttccccaaattcatctgttgaagtcctaacccccagtacctcagaatgtgactgtatttggggataaggtcttcaaagaggcatttaagttaaaaggaggtcctagggcaggccctaatccaatatgactggtgtcatctaagaagaagaaatgtggacacagacctgtacagggggaggaccatgtgaagacacaggagaagacgaccatctaccagccaaggagaggccgagaacaatgaagagacaggcatttattgaggacccgctgtgtacacagaaccaagccaggctccaggtagataaagactaagtcagggatgccactctttccctgagtaactaccacttgggtaagaatatgtgtcttttgcatctgcagagaactctatggtttttacatgcttttacccagtttcggtctaccttgcttctctggggatgttgaaagttgactcttggtggccagagctctggcatagttgttttgctgcactttaggtgcaggaactggcatctgtaacatgggactaagggaagaagcaggacttgaatagtttattgacaaaaatggttctgaatccagttggagttgtttgtttatttatttttgagacagggtcttgctcagtctcccacgctggggtacaatggtgcgaccatggctcattgtagcctggaattccagggctcaagagatcctcccaccttagccacctgagtatcagttggggttatttttatcggaaatatttatctcaacgcgttgtagcttacccatataagatggcacaggaagtatgtagatgtgtctacatgagattagccaaaactgcatattgaaggcttttttaattcatatgcattatactgagtgaaattaaccttaaaagagtagcctctgtatgattccatgtacacgcagctgtagaactggcagaactaatctgtggagaaaacaaatgagaataactgttgcctcgggggtagggaagctcagggattgacgaggaaggggactcccaggaactttctggggagatgagaaggggctgagtggtagaggagtgtggggtacaccagtccatttgtcaaagtaggataacttagatttgtacatttcaaggcaaatgcaatttactaccatccccaaaaaagtataaaaaaattaatggtgggccagggaggaatgaatagaggaaaagatgatacacagtgttgatcattgtcaaagctgagtgacaggtgtttactgtactcttctgttgactttgtgtttatttgaaattgtaatctttgttgattcctccttctgagaagtcagcctgttgcctcttggggcagatgcaggatctcagggcgttggggctaagtgacggcaagaagagggtttgttttgtgttttcaaattgccattttatttttatgttgttggaaatatcattagtgatgtggaataaattaggcatatgtaaaattacaggttgagcagggctatggtggctatgagtataggtataatgaggctattattttttgttagttcttgagtgatggctcatttgggtagaaatcctgttagtgggggcagtcctcctagggatagtagagtaacaggcactatggatgttagtagtggtaactgatttcacatataggatagtgatcatgttgtagcacttatatttgtattgatttttttattgttgttgtttatttctttgtttttgagacaaagtcttgctttgtcgcccaggctggagtacagtggcacgatcctggctcacagcaatgtccatctccggggttcaagcgattctcctacctcagcctccggagtagctgggattatgggcgcccatcaccacgcctggctaatgtttatatttttagtagggacagggtttccccacgttggccaggctgttctcaaactcgtgaacacaagtggtctgcctacctcggcctcccaaaatgttgggattacaggcatgagccaccatgcctggcctgtatttgtattgaataatataaatatggttactgttaatatcaggtaaagtaatggatttaagattgtgatggtggggttgtaggttaaaattgcggctgttcaacctatgtgagcaattgatgaatacgctaaaattttttggagctgcgtttaattgagtctccctcaaactcccactgagatggatagtgctgccgttgttaatagtatatttaggtccattgagggaaagatttggaacatgatagaaatttgggctagtttttgtcatggccccagccaccctggctgtaatcgctggacttgggtattctctgccctgtcggtgaccgtgaacttttagcttcttacctctggcacttgccaccgccccgtcccttcgctttccctttcatctgggaacagaccctcctcttcggttgactttgtcccccgccccacctagtctcttcttatctctgcctcctccctccttctgtgactcggaagcctttcttcactgtggtgaatccacttgggtgttatttctgttcaccgtagggttgtgttatggcagtggtgtgtctttgttcatagctgcaagctctgctgtgagtgcggggatgggggtgagtggaccatccccacacagctgtaaaagaggcatgctatatgattccatgtgtatgaacttcagcacaggcaggaggaatctgtggtacccgtgggaggaaaggaaggggtagaaattggaaagaggcacacaaggaactttgcgaggggtgaggagtattgctgaaaatgttctgtattttcaccttcatggtggttgccaggcacattcacttgtggtaattctttgagttgtacatgtatgatctgtgcacttttgtctaggtatgtgatgcttcaattaaaaaaacaaaacaaaacttgctgcacatcatggctcatgcctataatccaagcactttgggaagctcaggcaagaaagagaatctcttggggccaggagttcaagaccagcctaggcaacatagcaagacccgccccaccatctcaacataaaggaaaaaaaatcagctaggcatggtggtgcatgcctgtagtctcacctgctcaggaggctgaggtgggaggattgcttgattccaggaagtcaaggctgcagtgagccatgatggcaccactgtactccagcctgggcaacagagtgagaccttgtcttaaagaaacaaacaaaaaaatctagagagccatacaaggttcttaaaaatcttcccattctacctaaataaataagtaagtaatcacatttgtataattccttgaaagattggaagatctgatagcacgatctgatttcccatggagtggcagttggctagacctgtgtagtgactgcccacctccattcctcataacccacttcgctcgttagaatgtcccctgtctttacagcatccagcaggaattcctcaaagtgcctggtgtgtgggtggcaaatgtgtaaccccattgcagaattccctcctatttttgcttctctaggtatcttagaaggtatagggactgtggggggttcagtgcctggtctggtggtactcttgcaggggtacctttggacatggtgtacttttttttgtaagaatacttttggacaatacctgggacattggagccctgtgtgctcaaccattccagataaatttgctctgcttgaactggagaaaattggggttagcgaaaattggtcaactcttagcagttaaaagatgacgagacgttacctaggtgtttggttctgtaaataatttcctatttgtgtcttctaaagtaatatttcatcatagtaccagttaacacttgttccttggcattcagttgttgcttttaaaaatgcgtatatgggccaggcgccgtggctcacgcctgtaatcccagcactttgggaggctgaggtgggtggatcacaaggtcaggagtttgagaccagcctggccaacatggtgaaaccctgtctctactaaaaatacaaaaattagctgggtgtggtggcaggcgcctgtaatcccagctactcaggaggctgaggcaggagaattgcttgaacccaggaggcagaggttgcagtgagccgagattgcgccactgcactccagcctgggtgacagagcaagaccttgtcttggggaaaaaaaaaaaaaagcatatatgattgggaaattttcttcttagtgaatgggtaaggaaaggctaactttttgtgtggtgaacttatagtcaagattctattcacagtagctcaccctaaccacaaaccacagacctcagggaaataatcttgataatctgtataaatccaagcctaaggagaggctgtcagcatcacacctttcttttctccagctgaacgtgtcattctctgccttcttcctgcaagaggcagtgacttttttttttcttaagactactgactcacccagaagaaaaaaggctatctataaaaagacaactttatttgtatactcctccatcagatgaatggatagtgatgccttagttatagttttatgaccctaacagccaagctcaccatagacagggttaaaggaaaaaagttcatgtgcttttccactcattgacctttttgaaaatcttacacgcagagccaagtacatagctctaaagttctgcttcttatgtacagaataccaggcatgagtgggacccaaggagcttggggttcaagactgtgccttggcccaagaagcatccaggctattagggacagctctcaccatcagtttcagtccaggggagtaccgtgcaaagcatccaggggctgccacgcagcgaggcctctgattgccgcagggatgctgtgggaggtcctggggcttagagtcagaggtcctgggcagaggccctggctttgccggtggacagccgtgactgtgccacatgacgcatctgcactggttctcatttcatcctcaaatcactcggtgggaaatgcgtgctatcacctccgttcacagacagaaaacaagctcagaaaggtgaaggggctttgttggggtcatgctggttgtaagtagtggagcccagcttcaaacctgccctctaacttgaagcctgtgttcttgtctcttgttagtttgctaggactgctgtaacaaagtaccccagactgggtgccttaaacaacagcaagcaatttattttctcaccattctggaggctggaatccaagatcgtggtacggcagggttggtttcctctgaagcctctctccttggctggcagatccccccccacccccccagctgcctcttctccctctgccttcatgtggtctttcccctgcgtatgtgtccctggtgtctgtgtgtcccgatctcttctttttataatgacaccaattgtcatccaatcagattggattagggtcattctaacaacttcacttcagcttagttacctctttaaaagccctgtctccaaacacaatcacattccaaggtaccggggttaggactttaacatattaatttggggtggggggtgtgatacagttcagcccataacactaccctgtctcttagccatcatgagctcacctccctcatttttttttttttttttttgagacatggcctcgttctgcagtggtgtgatcatagcttactgcagcctcaaactcctgggctcaaactcagtcttcccacttcatactccccagtgactggggctacagatatgtgccaccatgccagataatttttaaaattttgtgtagagatggaggtctggctgtgttgcccatgccaatcttgaattcctggcctcaagtgatcctcctgcctctgcctcccaaagtgctgggattacagatgtgagccactgcacctggcctcacctccctcttctgtaaataggcatgccacctaaaatgaggctaccttcatccccaggcccgtcccataggtgaacccaggccaaaccctgttaaattcatcatcatttcatataatccttttaacatccttgctaggtaagaaatttactggacatcaaacttagcctgagctgagtaatagagttaggattcaaactctcacctgctgactcccgagtccatgtcttcagtgcactgcatcataaggtgtattatgagattccaaaactatgatttcagggctatggaagcttcatggcttatgggggaacagtcactacaggacttggaagtttcaggaagcgtcatgtgcgagatagcattgacatgccttacttttcaaatgttctcacattcctaagttgcaaggatgggtaggggcagtcatccacccaaagttagtcctttctgttcacgtttcttggctagatttcctgggaatttgttgcatatttatttatgtggagttatttgctttcagaattgcatggagggggaatctgcaatctggctgcaaaaagtaatttggcaatttattttcagggctgcccttcttccagcagcttgtttcaaattcaacctctggcacagagacatccatcattttaattgcatgttactgtttagtgaggcacaaatttgtttcattttctttttctttctcctgtagtagtaggtggttgtgggtttttttcctgatttgccacaaaaaagaaaaaaaaacagaaaaaaagaattacctaaaccacttttttatggccaaggagtttataacactgagctgtctgggggttttttttggtgttgcatatttggttcttaacctttcagtagcagaaatgcgagccttgccttttcttttcctgttcagataatgtccataatacagtcgcctgaacatagtcccaagaaggaaaattgtattggtctcagggtcagaaggtttgcttttcattctggttttgcagtgactgcctggctgtgtgacctgcctcttgcctcactttttccatccataaaatgaaggacttgaatgtgcagatttctagaacattcctatgttcttgtgcctgtaatactgagtcctgggcagggtggccatccaagtatgtccactgaggagcttgtcttgttccatatcgtgatgttcttattctgctgggttgtggattatggtgctttagttcaaagtcaaaaatcaatcctgtatccctcagcaatcttctaagggataaaaatattgtttacataaaattagcttgggtagaaagttagctttgatgttcaaagctaagaacttagctttcattgctgcatatacttcgtttcttgctgtaaaaggacgtggtgtctgtgaagttaggcacaaagtccaggagtgcatcccctttataaggtgcaccaagcactggggcatggggacaaaatgtgactcaacgtccataggtgggtgctgagttgggtgccaggactcttgtgtattgtgttttgttttcacagtgtggaagagattaattgttaatggtttggagtaattttttctgtctgcatctcgcaacactttcctcgtcaccgtggatgtcagactcttcacccagtgacctggagtctccaagtcagggctcagcccacactgtgctgacaccctccaatccccaactcctttgcacgttacaagattttgttttaagtgtttattatggagatttaaaaatatacaaaatatcgagaaagtgtggtgaaactctcatgtacacaacacccacttatgattctgaaatattttaaagcaagtcccaggcaacttattgtttaacctgttaatacttaaatattcactaataaatacttatacacacacacacacacacacacacacacacacacagccacaatatcattatactccacaaaacgaacaattattattttttttgagggggtacggggtctctgttgcccaggctggaatgcagtgatgtgatcatggctcactgcaacttcaacctcctggtctcaagcaatcctcaatcttcctcctacctcagcctcctgagtagctgagactaccggcatgtggaactgctcttggctaaattcttatttttagtagagatcaggtctcactgtttcccaggctggtctcaaactcctgggctcaagcattccacctacctcggcctcccaaagtgctgggattataggcatgagccatcatatctggcctaacaatgatttttttttttttttttttgagacggagtctcactctctctcgcccaggctggagtgcagtggcgtgatctcggctcactgcaagcttcacctcctgagttcacgccattctcctgcctcagcctcccgagtagctgggactacaggtgcccaccaccacgcctgctaatttttttgtattttcgtagaaatggggtttcactgtgttagccaggatggtctcgatctcctgacctcgtgatctgcctgactcagcctcccaaagtgctgggattacaggcgtgagccaccacacccggccaacaatgatttcttaatgtcacctgatacaaagtccttgatgggtttagtgcaattatcttaaaaaccttttatagttggtttgtttaaccagaagctactacagaccacacattgcatctagtagatatgtctcttaagttctttttatctgtacatccccttctcctcttttcaatgtggtttattgagttctaatatggagttggtgatgtagcgtaaggcagcctcagagagtccaatatcgttaacatctttctcctaaacagagttagtgcccttcaaaaaacagtttttagtttatgttttttttttttttttttttttaagaatgtgtatgttgtccaggcatggtggctcacccctgtaatctcagcactttaggaggccaagacaggtagatcacctgaggtcaggagttggagaccagcctggctgacatgaagaaaccccatctctactaaaaatacaaaaaattagccgagcgtggtggcgggtgcctgtaataccagctactcaggaggctgaggcaggggaatcacttgaacccagaaggcagaggttgcagtgacctgagatcatgccattgcactccagccctggcaacaagagtgaaactccgtctcaaggaaaaaaaaaaaaaaaagaatgcatatgtttattctgcttccttgtcttcaagcaaatgaaacctaagttaacgtcatgctgtggggatgtcctaagaagaaacattttttaaattatgaaaaacatcataaatacaaaatcttttatgtacgcatacaataccatgcatacacactgtatctgtgtatatatatggttttcattctggtaatcttttgttgcataacacactcccccagtgcttagtgctgtaaaacaaccacatttgtcatgatgggttctgttggtcaagaatttgagcagggctcacagctgggagatgcttctgctcctcatggcattgaccaaggggtcagttggaaggtgggctcgtgtggagtgtccaaaatggctgcactcacatatctggtaccttggaagggattgctggaaggctgagctcacctgggatggttgactggcacacgtgcttgtggcctcttaaacgtggcagtctcagggtagttagacgtttcacatggtagctggctcttctagagcaagcttcctaggagaactgtcacctagccttggaaatcgcagaacatcattaacaccatatttgattgggttgatgcactgacaggctcttccagattcaagggaaaaggacagagaccccctctcttgataagagtatcagagaattgcagccatgtttgtaagctccacagtttaaaagaataatactgaaactgacaccttaggtatttggctacctggtactttttaagtccccatgtacttgcttgtcttttggtgtaagatggaagccactgggatgggaggcacctgccttagaggtcattcagggtatctcctgcctcccattcccattcatgagggatttgaatggactcaattgggcaagtgcactgtgacagtttacatgacttgccttgcctgatgataatggcaacagtgggaggctcccaatacaaactttaaaagaagtttgtccagtggacctttgtgttagggaggctgcctgatattttgttaatgtccctgtcagtagggatagtatattagccagtgtgtctgctagtattgtgaccagaaaaagtgatgggtgaaaccaagtctcagggcagccagaatcaagtagcttcaggtatccttggctttagtgagcatcttgaggaataaatgggaaacccattcgtacactattgaatcactggtgttagacatgtttggacagacctataggtagacaggaattgaggtccctagcagatgttaggcgttctgtgttgattgaaagagggttcataggaatgtgaccagtggggtcacacagtcctcatagcagccctgtgaaggagatgctgttaaaggaagaaatgagcgctttgaatctctgcagagatctaaatacagcatggcctaaggacagtttattggcctggaacagaggctgatcaatagctgatcagtaatgcaacacaaagtctcagtgttttaaattgatccctccgtgagtcgaagccagtgcgactatggttctgtggtggaacagttgagcctagaatctgcctgtctgggccatctacagcacattggaagccccttgcccatggagtgaggagggccctggtcatccgtggaactgatcatcaatgcctccttccacggactcgcacaccaagatgacaggcagtcactttcttctaagattgttcttacttccttgttgatcaaaattaaggacagttgttttgttgcttcctctgatttctaagagattgttagcctggcaagtcaggaaatcaataacatgtgctctgttttaccagaattgaatttccaggagccgcctagactgttgacgtcccttctcactacagcgtcttggcctctgtgttagtttgtgagcaaataatctgctttccctgtgctacagctttcctgcccttcagactaagtgggaattgggaattgcctccccaccgtgagatctgtttgttggactgtgtgtggccttgtatcccaaccctagccaagaccatgcgtggagtaggctttcagtatttatgtgttaaattgggcttaagaaatatttcttgtttgcaaggcatattgtatgtgcttggagctaaaaaggtgaatgagatggctagagaggtagtgggatgagatagaaagaactctgtcctaaaaatcaggaaggctgggcccctattatagttctgctacttataagcggtatgaactgatgatgtaatttccctgaggctcagtctcatctgcgaaatggggtcatagaacctttgtgacattgaggcacccttcaactgggaggtgaaatttataagctggacagcctggccataagtccagtagaccatggacacttctgcatggtctttgcatcatcgtgttctagttttgagtcaccaaatcttgctgatggctgagatggtatttcttactcatgatgaaatgttaaggtaacttatttggtaatttcagatattcgtatttatgatgtccaagagtaaacagtttatatttgtttgtgacggcttagcagtgttggcaatgggaattcctgggccacttggtggggggtgtgtgtgtgtgtgtgtgtgtgtgtgaggtatatatatgtatgtgtgtgtgtgtatatatatatatatatatggctagtttcctgccaaggctcatagaaagtggcaagttattgaggggagagcagagctggtaactaatcatgaaatcagcacttcctagaaatagctgaaacaggccttgaggttggtgccttctgggaactgctggctgggaagccaactgctgatcccaggtggagctctgggatagcaatttaaactaggggtgtttaaggactgggaaaagaaggaattgatctctagggatgaacatgggtttacaaaagtccccaaaccagactaacctcaatttttctttcagtgaaattactaaacttcacatacctctatttttattaagcatctgacaaagagcacaccatgttattcctgtggacaagtgggagaaataggtttcgatgaaagtcacaataattcctttgtgtagaacaccacagggcgcagtgtatgctcatttgctatcttgctttttcattattagcatgatttagcaagggtgacagggcagatgagagtactccaaaacttggaggtgcctaaggccatggtcatattgctagagaagtggtagaactagtttccaacccaccatttctgcctcacagagtcccagggcacagccccatgtggtacaactgtgtgcagtcatgcctgggtttgaagttaccatcggacaggtgccgttaggtactgtcgaagaacagaaagataccccagcaccaccactccccacgtcagacctgcttagcagatttcccacgtgccgtaaaacaggtatcaatcactgataagtggaataacaaactgagacttgtaatgttcttaataggatagatcataggccaatttaaataggatgcaatttagttggaacaaatgcaaagcctgcacttggggttagaaaccatcactacaactattttggttgttttctaacctaggacttgttagcattttgtatataaaaggcatagcattttgttagccacaaggataggccatagtgggatatggcttccaaaacgtcaatgtcctagtgtgcgttaggacagacgaggggtctggaagggatgacaggagtaacagggttctgcatccaggtcctggccagctacagagaattccagtggatttggaccaggcagatcaggcttctgaaaagtgagttgtttgaagactgttgtaggaactgaggattctccttaatccacattagtgtttatgtttattgagcctcagaatgtcagctggcagagaagcaaatatgaatagggcagggtgctgccaacaaggaagctgaataatgaagagtgttacttgaaattggccctggaaactggcttgctgcaggtggagaaaggaatgggggtgcgggagaagggcatcctaggcaaaggaaggacacgagccaagcctgagaggcggggcctgctgtgtatggtggggtgggccttgtatttggagaacaacacgctttgtagtttgaccggagcctagggtacatgtagggtcctgggagggataaaacttgaattaggttaggcagggttgatgggtgcagagtccctgacaccaggctgaggaacctgcactttattctctggtggatgttttttgagcagagaagtgactaagacaagggctgtgtttacggaaagaccattctggcaaacacaggaaaggtgggtgtcaggagggacccactagggggtgggtgtcttagtccttctgggctaccgtgactaaataccttagattgggtaaattataaacaacagaaactttctttcctttctttttccttcctttcctttccttttttttgacaaggtcttgctgtgttatccaggctagagtgcagtggcatgaacagctgactgcagcctcaacctcctgggctcaagtgatcctcccacctcagcctcttgagtagttgggactacaggcatataccaccacacccagcttttttttttttttttttttttttttttttttgagacggagtctcgctctgtcaccaaggctggagtgcagtggcacgatctcggctcactgcaagctccgccttttgggttcactccattctcctgcctcagcctcccgagtagctgggactacaggtgcccgccacaacgcccagctaattttttgtattttgtttagtagaaacagggtttcaccgtgttagccaggatggtcttgatctcctgaccttgtgatccgcccgcctcggcctcccaaagtgctgggattacagacgtgagccactgtgcctagccctagttttttttattgtctgtatagatggggtttccctgtcttgcccaggttggtctggaactcctggactcaagcgaacctcctgccttggcctcccaaactattgggattatagacgtgagccatcatgcctggcccagaaactttttcttacggttctggggcctggatatccaagatcacagagccagtagattcagtgactggtgaggtacttgtggatggcaccctgttgctgcatcctctcgcagcagcagaggcaaggctgctggcttcaatgtctttcataaaggcactagtcccattcctgagggcagagccctagtgacggggcctgaaggccccacttcttagtaccatcacactggatattagttttcaatgtatgaatttggagggacgccgttattcaaactgtagcatgggaccacttaggggcctgttgctgtagtccaggtacaaagtgacatgacttgagctgtaatggagatggaagggaagaggccttcccgaagctggccacagaaagacttgccagccaggattggtggctcacacctgtaatcccagcactttgggaggctgaggtagaaggatcacttaagcccaggagtttaagatcagcctaggcaacatagtgggaccccatagtggagtacacctgtggtctcagctactcgggaggctgaggtgggaggatcgcttgagcccaggagatcaaggctggtgttagccatgatgacaccactgtaatccacccggggtaacagtaaagaccctgtctcaaaaaagaaagacacatcatctgatggatgtggggcaggtagataaaggggagccacgtttaccctcaaggagatggttcctgagatcactttgactgcataggcaccgtgcttttgcaattcacttcacaagtaggatgtatacatctgactggcacgctcacatacagcttatttcctcctttcaaacctgcctgggatggctggcatcttatgctattgagactaatgagatttgatgggttggtttctatcttctttgttcttccgggaccagatctgacctgttaatgttgcacttgggtcaggttgcagtcagacattgtcagcagcatcttacctaagaaggtcaggatagttcatttattttggggggcagttaagacatcagctgtccagcagtctcccttatcaggagcacagctaggaaccagtgaataagcaaaatgagaatctcaggctggccagcaaagatatcccaatgtccatcccttgtcctgctggctgcctgcctgccccagtctttcactggcaactatgtactcttattttacacatgattttaatgagctgggttatttttagctcatgtcatcagaaggagctgctacagagacatagactgactcaaaaacaccagttgttggtctttgggaaaagttaatgtgttggcagaaaaactagaaaacattgatgcaagaactcaaaggtaggagctctctggagtctactgtgtttgggaacagctcaccatacaagtctggaaggagatggagcattattgcatttcagaacggggatcccaacttagctgtcacattcagtacattctgcttaagaaggcagggagggaaatggtgttgcaacctctgggtttgcgtttcaaccctgttttggatgacttggcccctcaagaagtacttgttcagtgagaacttcctttagttcctatagggcttcccatagtgagggagtaacgtgagttgtgtctgcaacacccagagtggtggttgggacttgatgagcaattggcaaatatttgttaaatgagtggatgaattcgtcacagagagggagacctgggtaacgataaggcaacaagaaatggctttccaggctcgtcacagtaactcgtcttctgttataaccactagacaacgcgtcgcataatggcaacaaaattatgcttaggtaaacagctttggcagtgcacacagttccctaggtgcttgttcatggaatactgaatttgaaaagattttaatgagtgtatcctcttttttaggccttctgctggtagagcaccaccagtctgttgtcagtgttgtagcatggctcatccagaacatctctttcttggccccagatcttacccacctcctgctgctatctatccttccattcacatccatccatctacccatccatccacccatccatccatccatccatccatccacccatccatccatccatccatccatccacccacccacccacccacctaccctcccctgcatataatagtcatttatggagcgcctgctgtgtgccagccaggcactgtgctttggggatggagggacagagatgtgggtactcagatgaacacagctggtccctgtcctcagggagggagtgctctcagtcagaagtaggattctgacacaggagcacaggcagctgcagtacagtgtgatgagtatgtatatacttaaggcacacacctgcttacgggaatgctgaggagggagcacttacttctccgggggcaggagtagagttggggaggctcctgaaagacggaatgtttgggctaagcctgaaatgacagtttgtgtcatctcagatttgtaggggttgccccgggtggggtgtccaggctggcggtgcaggcaaagtaagttacctggagctttcttagttttgagaggggacactgcaggctgggaagagtgagagatggtggtttcaagggcagtgaccttgatcaccttgtcttcattctacctggtaacccactggggacccctgtttggaggatccctccattccagccctcataatttaaccagattattcttgaagctggaaagggctgttgggaattctctcttccagcagaaggtagcaaacaaagaacatacttgggggacatatgggaggggcagttacagatatatttaaaaaagcatcagagttgagtaaagatgatacctatcccccagcccctgctgtcttccacctccgagccagctcagtgagcatctagcatggcaggagggacctgccatcccttgaaagatccctttcccaacctccacctcgagccccttctacactaagagccattttagaaacatcagaaaagtgagatttggaatgacctagacagaaacttaggctaaccctcttcattttacgtaagtagagctgtgatggttcagttaatactctgtgtgatgggatggtcagcccagaaccaaaacagacccaggtggggaatgggttggatttggggccatttgagttttggtggccctgtgtattcagggcaccatggcagatttgctgctgcaggataagtctgggttggcgatatggatttggggaaattgtgaattgcttaaggtcgcagttggtggtgcatctgggactagagcacaggtttcttgcttcctcctggcccaatttttctgccacatcctgctgctaaaagtgttacttaactagttctgtcccactagcagattctctaatgaaacacttgagccatgataataggtattgtgtagagccagtggcaatggatagtaatagggaaaaaaatatccaaagggtgggttgttaaggtcaagaaggaaaagtaccagaatggtgatttttaagaaattgtatttggtctctgacaactgccagaagatcactgttaaaacttggggagaagccaggcgtgggggctcacgcctccgatctcagtgctttgggaagctgaggtggatcacttgagcccagagtttaagaccaccatgggcaacatagcaagaccccgcctctacaaaatattttaaaattagcccagtgtggtggggtgtgcccgtaatcctagctactggggaggctgaggcagggggatcctttgagcccaggagttcaaggctacagtgaactatgatgctgccactgcactccagcctgggcgacagagcaagaccctgtctaaaacaaacaaaaaacttgggaacaaagccatccgcggtttctctatgcttcatcctaatatagatggtttccaatttacagtggtttgactaaggattctgtggctttatgatggtgtgaaagtaataatgcattcagtgaaaaccgtactttgggtacccatgcaagcattctgttgttcactttcagtacattattcaataaattacctgagatattcaatactttatcatacaataggctttgcgttcaatgatttttgctgagcacgtttaaggtaggctaggttaagctgtgatgttcagtaggttaggtgtattaagtgcgttttttcttttctttttttttaagtcaaggtgtcactctgtcacccaggctagaggtacaatgcagcttattgcaaccttgaacttcaagtgatccttctgcctcagcctcctgagtagctaggactacagatgcatgccaccatgcccaactaatttttttttttttttttacttttttgtagagatggggtcttgctatgttgcccaggctgatctcgaactcctggcctcaagcaatcctccagcctaagcctcccaaagtactggaattagaggcatgagccaccatgcctggccttaagtgcatttacaacttataataggtttattgagatgtaatcccgtcataaggagcatctgtacaactattttcattttagcaaatttcctgtttttatcaagcagtctatgtacataacacatatgtatttttatttagttgcaatcacagcttgcttattcctttaaagtctgtttacctaacattgtcattaaaattttccttgttttttatctcatcttcgtaattatcttgtataatggctgaacagtattctggagtgttgatgtatcgtggttctgcgtccctgtggtggagagatgaggccgtctcatccctccagcctcctttctccagttgcatatcctgccttctgcttctgttgacctgttgccttcagaggagtatgtcgaggaaggaaagagcctgaaggctgtaatcccatgatgcagttttcattctttgtttttactttgtgttactgctgctatgtgtgtcacacaaatacagctgcacaaagaaaacaaaggtacccagtttactgggttacaagaaggcagacatcctggtaacactacacaagtcaggggagaaccctgcccaccgcccagaagcccttagtgtaaccttgccagaagatcaacaattaccctgactttattgtggctgcttccttgttcttctccagttttgtcacccaagtgtgcatctgtagacgttgcattttcattttgcctttaagaaaaaagtgtattttaaatctcttttaatctgtaggtatcccctctatctcttctcttccctatattctgcttgttgaagaaagaaatggaatcatttggccgggcgcggtggctcacgcctgtaatcccagcactttgggacgccgaggtgggcggatcacttgaggtcgggagttgagaccagcctggccaacatggtgaaaccctgtctctactaaaaataagccgggcttggtggcgcacgcctgtaatcccagctactcgggaggctgaggcagcagaatcgcttgaatccaggaggcagaggttgcagtgagtcaagattgcaccactgcactccaggctgggcgacaagagcaaaactccatttcaaaaaaaaagaaatgagatcatttgtcctgagtggttctcacaggctaaatcttgcggagagagaggttggggagcaaggttacatcttaggtgatggggtgttcttatcaggaggtacgtaatgtctggttgtctcctgttgtgatgttagtagccactgatgttcagtgcttagaacctactacccattaggggttgcaaaatgatgatattgcagttctgttatttcttcatttatttgttgaaatacttcaataaagaaaaactccacccacctactatttttaaaagctttctttagattcacgtgtcatacagtttgcctatccaaaatgtacaatccagcagcttttagtgtattcacagagttgtgcagctgtcaccacaagcaattttagaacatttcatttaaatccccctgccccctacaaataactgtactccccttagctgtcgtcccccaaacccctttgcccgaagcaaccactaatctaatttctggctgtatagatttccctcctttggaggtttcttataaatggatcatatgatgtgtggtggctccttgtgtctggcttttttcacttagcataatgtttcctaggtccatccatgtggaagcacatatcagcacttcattcttttttacggccaaatgatagtccattgtacagttatactgtcttttgttgatccattcatcagttgatagatatttgggttgtttctacctttgaatattataaataatactgctatgagcatttgtgtacaagtttttacgtgaacatatgttttcatttctcttacctagaagtagaattgttgggtcatgtggtaactaactctatgtttagccatttgtggaactgccaggctattttccagagcagctgcacagttttacattcccatcagcagtatatgagggtttctacttctccaacatttgttatgatcttttttaaaattaattaattaatttatttatttatttatttatttatttatttatttatttatgagacggagtctcgctctaccgccgaggctgagtgcagtggcacaatctcggctcgctgcaacttccacctccccgacctcagcctcctgaatagcgggattacaggtgcccatcaccataccctgctaatttttgtatttttagtggagacagggtttcaccatgttggccaggctggtcttgaactcctgatctcaagtgatctgcccgcctcagactcccaaattgtggggattacaggcatgagccactgtgcccggcctttttaattacagccatcctagtgagtgtgacatagtatttgattgtaattttgatttgcatttccctcatgactagtgatgctgagcatcttttcatgtgtttattgaccatttgtatgtttggggggaactagttgtatgtaccctctgtccatttttaaattggatacttgtctttttattattgagctgtaatagttctttatatattctagatttgcaaacatgttctcccatctgggttgtctgcacttcatgtctccatgtcctttgaagcaaaaaaaaaaaaaaaagtctcacattttgatgacgtccagtttattttttcttttgttgcttgtgcttttggtgtcatagctaagaaatcattgtccaactcaaagtcatgaggctttatgcctgtgttttattctgagagttttatagttttagctcttacatttaggtctttgatgcactttgaattaatttttgcatatgctgccgtctactcttaggttacccagtgctgcagttaaagggagagtcagtgctggattctttccctttctttaccagtttccataataaggagttgccaccgagtcatcctatggagttgggtttttttttttctttgtgattatggcacttagatttaagcatatttgtgtttggatccattgagaatgatgtcgttttatctgagaagcgtgtctgctccgcttgggtgactattaagaagccttttcatttgtcagagacttcagtatccttgtggtggtttctcattcagactctctctcagttttcccaaggagaggtggggagagtaggtatcctgaggcccgttttacaggggcaggaatagaaacgttaggaggagtgacttgtacgaagtcaagtggcagatgcaggacttgaccccttgtttctccgactgctttcttgtgctcatgccccatgtgtataccacatagtcaaaaccttggcatgaacctggaatttgagtttgagtcctggttatggcctgtgacctccagcaggtctttgggtttccctgagacttcgttacctactttgtgaaatcggaagactggaagagccaatttcagaggatgagctttctttcctaagtaaggttgcctgcattgagaaacagcccagcttttgctacgctagagtaaggccctgttacacccttcttcaagtgtgtctgattttggcaaagcttatcttcccatgtaggtattcatccaaaaagtattctttttgtaagaagagactagcaaaagttaacagggttatctagattcttaactttatgctattatgtggcatttgagtttctttaatcatgagtttgtattacccttataatcaaactaattacaaatttaaaaatttgtgtgtgctgacatgtatgcaatttacaaagagaagtaggttttttttaaccttttttttcttatctagctgtctcaccctaagttttttcatcttcccaattgtcttccagaaacatgccaaaggccaggatttgtttgatcagattgtgtaccacttggaccttgtggaaacagattactttggcctccagttcctcgactctgcccaggttgcggtaggttattgctttgattcatttcagaacagattggcttttcattgctaattgcacgtccacagttgctagaaatgggtagagaaaaacaagactaaaactgtgatactgtgccagtaacaggcattgggatggaggttgtggtgcccaagtgccatgcgtcacaatgcttgtaggatgcctcacccttgaggtggccagtaaccaggagaggatgtgaatgggattcattagggatgcattataggcacatttctagaaaaggtagaaagaagaaacatcattatagaagttctttcaggctgggggcagtggctcgtgcctgtaatcccagcactttgggaggctgaggcaggtggattgcttgagtccaggagttcaaaaccagcctgggcaacaaggtgaaactccatctcaacaaagaatacaaaaattagccaggcatggtggcatgtgcctgaagtcccagctactagggaggctgaggtaggaggattgattgaacccagatggtcaaggctgcagtgagctcaatcgatcctgccacctcagcctccctagtggctgtattccagcctgggtgacagagtaagaccctgtctgaaaaaaaaaaaaaaaggaaaagaaagaaactcttctaatggtgctgcttttatttttaaccagcagaagaggctgtgccaccatcttcttacagagtctggctgggtagagagcaggtgctgtgaacggagctgaatgccagccaggcttagtggggttgggggtggatggggttggagcaggtcttgctgttgccgagaaccatcttgcaggttccaggaagctgtgttaggtcagcactttacttactttgcctgagacagaactgttcacagtggagatgttagaatgagtgaactccacaaagctcagacccactctttttaaaagcaggaatgacttcatagttccccttcccaacaaaatctagcttggggtttcaaagataatttattcgacaatctaaatctatttatggagtgcccattatgcactgggccctgtgctgagcattgcggataaagcagtgcacatagatatgtcatatgccagatggtaataggagtcaagaaaaataaaggcgaggaaagggtggactggggggaggggaagcactattttagacagtgtattaaagtctgggttccctgatcaggatgtttgagctggagacctggagctcccataatggttaaggctgtctactggaagatacttatcagatacttcctgattgtatctggaagttgtcaggtgacatgtgacatttgtaaggtgaagatgtacaaaatcggtacctgggaattaggtctgctggagaatgttagtgacatgctgagtccttcggtgacagattggaatctggacgggaatgcatcctggctacagtgcctctggggtggacactcccactggatgtccctgtgcagatgtgtccctcaacctcagccacttcctctgcatcttcaggacgtcctgttatgccaccccaccccacccccaaactgtgtcctcctcaaactgtcctcctcgaaccctcccgggttccttctcatttctcagccagagactctcactccgtccaccggacccgggagaagggcagaacaacttttcctctttccacctctgagtccaattccgcttcctttgaggttgggccgaccagtgtcctaccctctgacctcatgactgtccttcgcatccctcgaggcctttggtgtctcagtttttctcttcctctgggtagcctcaggactgaagttactggccctcctacatattctggacactgtttcctgtcatttaagcttcatttgagcagattgacaagacccacatagattctcgtgtgtcctgtcaccacctgcactccaagatccagaattctgccagtccccattccaggataacttcccttgattccttccattttcccagttcccctccctctgggcttggcccacagcggtctccttctgccctttgtcccctcccagccttctcctgccctggccttcctcccagccccagccaggcctcggccacctcacctgtgtcctcacttggcctttgattctcctgcccccgtgactgtcccctggcctccccttgacacgcaggcccatctgtttcctctgtggcttgtcccagcctgccaggcgttgctggagagagccacggtctgtgccttctggcatcagcaccgatcacaggttcagcagagtccaagctcccgagctgctccctgagcctcagtagccccagattgactcttggccacccgacaggtccatgtctggatctgagcacagacctttagtccagtccccacggaggctttgttccagcagttgcctcacctgctgagaagaccgaggtcgttcagctaaaattccttgaattttcttcccctacacttccgattctgtctgtccatcttttttttttttttttttgcatgtctacttctcaatctactctctacacctggagcggcaggcctatttccacttgcttcctgaatgccatatttagggttctctctgtccccagcatcctccacctgtttccagcacctgccactctccagccctcttcttccctggaactcttcttgattctgccttctcctgtgtgtcttaaagcgtgtggtatttttggcttcagaatatctgtggccctgaactagaagtcagactggaccttgttcctggctctgcctctgactcatttggtaggctttagataggctgccttgctcctctggcctctgttttctcatctgtaaaatggggtacttggacctgttctccaagaaaacttacacttctaatgttcagtcattctgagtctaaaggggacgttggcatgtctgctgcaaatgcgttctctagttagaaaggaggaggtatctttcatttctgcccttagaacctatgcctgttaccttggcagcatgtcctcatccccaagtgacccctcattagccactcagattcccagaaagccaagtctgtgactccattatgaaggcctttgccatgagcctctgctgacttggctggcaggctttcccgcccgccagtgccctgtcactgtgcagcaggaggggtgttcacagcaggatacaggcggctttcccaggccagacacctgaagatgctcaggctctcaggcctttccagcatccaactctacaaatttgaggcaaaaacaggtgggagggcgagggtcctcatctgcctccagctctgaggatgcaagagctgtgcggcagcagcagttcccaggaccctctagtcattcccatctttgctttctgagctggactccttacagtctgggtcttatgatgcctgcacttatctctgtgcctttgcttatgctgtttctccttctgctgtttctcacctgtttaaactcccagccatccttcaagaccatctcagatgacccccccctcacccttcatgaagcgtgtcctgaactctcaaagtgttttttctactatgcaaatcttattttgccttctgtggccatttgactgtttggccttgggtttgttatttgtgtgtgtgtgtgtgtgtgtgtgtgtgtgtgtgtgtgtgtgtgtgtgtatacacacacgtatatattatgtatatatacactatatatgtgtatatagatacacatatataatatatatgtatatatacacatatttatgtatatacatatattttatatatatatataaaactttaaatttagatcctaagacttaggacctcctcctcttaactcggtgattcttggggacaaggcacataacctagaaccttcttttttagccccagaaggaacctgagggagaggcatttgtcaaatctttctagatctttcttttaccatcttctagatggtgaaaccaaagcccttagatcttggcaagtcatttagtgaatagcacagcttggactcaaactcaaattttgcaatttcaggtctatgtgctctttctagtacaccctactcttgagtctcagtttcctagctgtaaagtggaggtagtgtaataacatctgtttcatggggaatttgaggagctcagagaattaatggaggagaaaagtttttgtaacctgggacgtggatatgggtctcctctttgtagctgggcagtgtgaggggggaccggaagtcatcactgcccccaggggtgagcatgctaagaaggtacagttagctgattggaacctgtaaggcccgccttgcctgtgggagaaaccttagccaatttaatcaagaggcttttgggagagtctgctgagatggcttttggggtcattgatttttataggacctgggaggtgattggatgtcataggaggtgtttctgcaaacagtagggtaatagatggacccggaagggaatggttcacttggctattggcttattgccccataattgagcctccttcaagcaatggtgttcccacccagcccctgacatgcagatcagaggttggcagctgcagggctcttggcatggctctctgcatacccagcttatatccccagctccctgaaaagaaccacgcctggtttccatagtgccctgcccagccctgaagcaactgtcaaagcgtattgatatcacctatttttagcagttgggactaggacctcctgtttcccttttccatgtcaaaacaggaggccatccaggaacccactctgcagatttcactttggtacagctcaaagcaggggctgggagtctgtgtctacatatcaaagcttgcttctgagagccaagggctcaggcctgcactgtctcactttcccactgcctgatcacgataagtgctgtttacccagttctcgccctgagcccagcactgaactacagtctttgtgaactcttgtttaatattcatcactgatctataaagtaggccataaaacagaaccattttacagatgatgaagctgaggctcagagacactgatgttcctaagaatgttgtaaaggttaaagccaggattcagaacttggtctcattccaaagtccagcactttccacttggctatacggcttgaatatgcacttggttcatgcgtacatacatatatagaaggaagaaagggaaggttcagtcaatcccattcagccagctttgacttggagcttactcagtgctgagctctgtggttgcacagatgagctggatgttgtccctgcctgccacattctgttgggagacatagacaagtaatcccctgaactacggtgtattcagtcctctaaagaaccagtgtaaaggtccctctgtgggtctggaggagagactgtctacgtattactgataaaatgaacaagatatccaagagaaagggtgaacactgatgtgggccacagagaatgagaggagtttgccaggcagaggaggggcagggatttggggcagtggtagtaacagccccaccaagcaggagcctcccttcctctcttgggagcaggtgtcctggagggtagatgtggccactgtaagtccttccctaagctgcttttcaacatgaaaagggagctttttctgatggtacattttgcagtaaggaatccaaaatagattattttgacctttgtctcaagacttgtcagatgtgcgtcctctggcctttgcagcatagaatctggcagtgagaggcgcagggctgcatagtgaggttggtacatagatatggcgcctgctgggagggttcaatagccactaaagggactcttgcagctcctttggctttgctttaatgattggtcagaatgtcatcacatttgccacttgtgtggacactactgggtgctcttgccatctcagatgtaattataagaagaaaagagtgactattaggtatacctggaggggacataggagagtataaatgctaagagtgggatctatggggatctatgttacaactgctggaaacagacaaaaccccttccttccacccattgggttcagtgcagtttccatagacagtgcttaggggttagttctgttcacaggggctgaaactgaggctcaggtgcccgtgctctgaggtgggctgggggtgtgggggggcttgcttgtggccacacatgaggtgagtggcagagctgcaacttgaactctaatcttctgcctccttgcatggtggtccaaagaaatgtaaactgcactcaagaaatgccacagggcgtggtgtggtggctcacgtctgtaatcccagcactttgggaggccaaggcaggtggatcacctgaggtcaggagttcaagaccagactagccaacatggcaaaaccctgtttctactaaaaatataaaaattagccaggcgtggtggcacatgcctgtaaccccagctactcgggaggccgaggcaggagaatcacttgaacccaggaggcagaggttgcagtgagcccagatcacaccactgcactccagcctgggtgacagagcgagactctgtctcgaaaagaaaaaaaaaaaagaaatgccacaggcctctcctcatcctgtctctgaatgctgggaggcaggccgagtgttttcctgcccacgtgcaaatactggtgctgaatcggaagctgctaaaggggtctctaccactgatttagatgattccaaggaagtcatctcacaccagcaggtagctggtgttaagtgagtttatagggcttggtcatcatggggagcaggaaagatccccccacaggcagagaaggcactttaggctagtccgtggtgtggaaacctagagtactggatgctgacgctgacaggggtgtgagtttgaattccagctctgcctcttatcaaggctgcacctcccacaccccagccttagtcagaggatggatgtgatacagtaaactccaaaggcattcatccccttccttctcttttcatcctttgggtacaatttgattatctcttcagattccttccagctctagtttaaacacaaactatatatatgtatttgagatagggtcttactctgtcacccaggctggagtacagtggtgtgatctcggcccactacaacctctgccttcctggttcaagggactcttctgactcagcctcccaagtagctaggactacaggtatgcaccaccacacctggctagtttttgtatttttaacagagatgggattttaccatgttgtccaggctggccttgaactcctcacctcaagtgatccacctgccttggcctcccaaagtactgggattacagacgtgagccaccacgcctggcctatttttaatatacacagggtcttattgtcacccaggctggagtgcagtagtgtgatcgtagctcattgcagctttgatctcctgggctcaagtgattctcccacctcagcctcctcagcagctgggactacaggtgtatgccaccatgcctagctatttttaaaaaagaaaagtttatagagatggggtcttgctatgttgcccaggctgatcttgaattcctgggctcaaacgatccttctgcctcagcctctcaaattgttgagattacaggtgtgagccaccatgcctgactcagatactcttcataagccaagaaaatttgcaggtcctagaaatcccgttatgagtttcgtcactcagacttaatggtgaaggctcaggagatgttccagcagagagttgttagatgctcttcaactcctgagctgctctgaggccttgtagttccaatgctcccatgtagattttagatgattaaattctacaaccagccttatgggtgtcatatttccagaattgatgtactattggaacagatgggccttgccaagatcatctcacacatcttgatttatggaaaggattttgccagatggacttggatgagaaattcagattagaaaccacctttctaacacccgttagagtgtttgagtgaaatgtcctgccatttgaactcagaattgcacctgtctgtttccagtgactggtttaatggtctgctaagagggccggagccgtttgccttggcgtttacccacaggcggcatggctatatttagccaagacacaggtgaacatctgagacaggtcccgccgctgctgaatacagtcctcaaagccgagcgtaggatacagtttactaaatgccatgttgggctttcattgccccagcgttcaagccacaaggtggtcttgtgggataaaacacgagtgatcagagtctggaaggcccctgcagctaagaagaaagtcagatcattttgaactggttggatacaagataggttttgtcatctctcattttaggattgtgactgggtttcttattgcctctgatgcaggcaagcaaaacctgatctgaacaccaaggggtcaaggagcttttaaaatgaggaagccgtttctgattccattctcggcttcaccagccccagacttttcataggcatctatcctggcaggtcctgctttgggcagggctctgtggctgagcaggaaggatggagcccagcccacaatggctgaaggggtgccttttgcagtgtggccagagggcaaagcagtcagccacccggtaccagcatctggctgtggtctgcctgtgaatgcacaccagccacaggtgtttggccatttcacctcttggactagcctgtaaaacctgaaattgcttgagattttgcagagcccaaacagcaatttcgagaaggggttgtgcatgtttcaagatcatcagaacctcttcctgggtaggagaggatgtggaaaacttcagtactaaatatttaacgggcacactggaagcatttatgaaaactgatgctctgagactctgtttaatgagtcttgggtgggacctgaattttgactttttcgaagttcctcaagtgatggtaatactaatacacagccaggatcaaaaagcacagccaaggagactgcacaagttggacttggctaaagatgagactttgacagtagagggagaggaaagggaggcctaaacttgttctactcaacatggtggtgagaagactaaagaaaggaaagaaatggaacaagctcctttaagtgacaagcctctcatgggctaattagactaggggatgaatggtgaattcttttgaaagtgaaaagaacagttttagtcatagccattagcatgttacttggtaggaaagtaaatattgggcttaaatcaagtctgtatcagccccctccaggggccaaagttgggggttttcagcttgtttgagggcactggcagcatctgattctaatgaggtgaactcataaaacaacaaatgaatatggacgtgacaacccagcccaccccctaaaaataatattctcattaaaataaacaattatgaagcaaggtaaaaagaaagtaaatggcattcacagccccaccatcccaaaataacctctacaattccttctggatgtatctagatagaaaataataattttatataaatgagattccacctgatttttttttctcatgtaacattgtgctgtggatctcttgtcacatcaataaatacaggcctacatcagttttaaatagtatttcattatatggatgagccattttctaatccgtctttgttgatggacatttaggtcatttccaattcaaagctattaacaatgagataaagcatcctgcacatgtgcgtctgagatacacatcctgctgcggtgacattacatggctgcctagcctggagtggagatgacaaaagccccacaacccacgttctcccatggcactgcccccagcttattgtattatcaatcatctgttgttcgcttttgtgtttccttatccccttcctcccacacagtcataatggcctctttggttaggtgtggagtacactgtcctggttgggtcctgccgctccttgttattagactgtgcagagtgcaaatgtgtctgaaagcccattggcagtcagcagaatggcctctgactctgagtaactcatgagtagcccactctgcttgtatcaccccagccgtctttctaacagagaagttccagcatgcattaggtccacataaagtgatgggaacagtccctacttgcctcactttaaaaaaataatttatatttaatatttatttatttctcaagagtcttaacaggggcctgctgggtgccatatcttgtgcctggcacaggaaacagtcacaattaagtgcacggtccctggcctccaggagctgatgtctgtctgcacagaagggctcagtagaatgctcctaaatgcagttctccatggaagttaagtggctgagactccttaggacagcagtatcaacgactttgacttcatagagaaacttttgtgtgaggcagatgattttgtaatctcctcagataagactgaagcagttcttttggtcaaagctagaggaagttaaaatgccctcattgaccagagcaaaatgatcttaggcaaatccctgcctgcctttgcatttgccgtgtggctcattttcctggcaaaagaataaaggggttgtgaattttagttctgtactttaaagagtttaggacgacaacctcaagaccagtgcataatgagagattattggtatcatagcttgtactttttgctagattaatggagacctggaatgcttggagaagattggctgtaacttgagaaactcagaaggaaaaggcagttggtgattctgctgatcaattggttaaggggttttatgttctttcaggcaccactttgtaaaacttccagaaactagggagtcccctccccagaaaaatgcacatatatgcataaacgttgaattttttttttttttttttttgagacggagtttcgctctgtcgcccaggctggagtgcagtggcgcgatctcgactcactgcaagctccgcctcctgggttcacgccattctcctgcctcagcctcccatgtagctgggactacaggcgcgcgccaccatgcccggctaatttttgtatttttagtagagacggggtttcaccgtgttagccaggatggtctcgatctcctgacctcgtgatccgcccgcctcggcctcccaaagtgctgggattacaggcgtgagccaccgcgcccggccaacgttgaattttttataccatcccaagcagtttgcagattcccagcctaagaacccatgatatgatccaaaccctggtttttgtgggtagaattactaaggcttttagaggagggtaactgtgagggctgaataaccttgctgatgaactattcctaaagaaactttttttctttctttcagcactggctggatcatgccaaacccataaaaaagcagatgaaaagtaagtaagcagaatttagctcactcatttattttttttctgagagtaaactcctttgccagtgttttgaggtgttatgttttcattagaacttggaagcattttaaaaatcaattcggtattaagtggatgatttttaatttcttaaggctagccaaagatgagagtttaaaatttgaataaaaatgtttagtggatattgaaaaaccaactgtgctctcatttgaaatcagacgcctctgccaatgagaactgattaacctgctattcagaaactcagctttatacctattatatctacttctaatgagttacaacatagactcagaggatgagagagtaggagggctctttgatagtctgctacagctttctcaatgtacaggtgtggaaaccacattttttaatgttgtttatgcttgggtaatttttaaaaattcatattctcttaaaagtactttaaagtatttttagagaacagaacactttgcatcactttcctttagcctttgtactttgtaaaaactagctgtcagtttggagtattgtggcatcaggggtgaaaataaaatgtcagcttttagtaatctgtctaaatcactagggtttttctcctggaatgaggttactagctaaactatcttagtcagcacaaaagtccatccatctcagtttccctgatgaggactgaaaagaattggctagtgtcgcgtgcccagttatgctgtcctgatgttgtgctaaatgttatagatttaacgtgctttcccttttgtccatcctgtgatcttcaaaactgggggaaaaacatcttcaaccttccatctccaaatgtttagttggacctgcttatgctttacactttcgagttaaatactattcttcagaaccaaacaaccttcgtgaggagtttacaaggtaggccacgatgcagaacaagctcccgcccagcagggcttgccttacatgtcatttatggctcttctcaattgtgggtttgcctcttcttctgtctgctgtctatttctcagcaagagttattagtacttttccggtgcttccgtgttccgttaaaaatccacaactttgcttaatttgacatttttctgagtgaatagaaattagaagatacattttcttgtcacacttctattttcttggaccctgggtaaattaattggttgctctgcggcgttttatttttatctcaactacaaaaagggaaggcagatattggaaaagcatttctcagtccttaatcgccatcttatgttttaagagattgcaaaatattctcttgattgttacaatacaaggaacctctttaagaaaaacagagtaattatagcaaagttgttaaaatcccttcatgttatcttttaactcccctgaatttctttttttttttttttttttttttttgaaacaaaatcttgctgtgttgcctaggttggagtgcagtggcatgatcttgggtcactgcagcctccacctcctgggttcaagcgattctcctgcctcagccacccgagtagatgggattacaggcgcacaccatcacactctgctaattgttatatatttgactggagacagggtttcgctgtgttagccaggctggtctcagactcctgacctcaagtgatccacccgctttggcctcccaaagtgctgggattacaggtgtgagccactgcgcccggcctgaatttcttttttgttttgtttgcccatgtctatgtcttggacttcagaaacagggaagaagaaaaagaaaatttgagtaacattttaaatgtggagtttccctctacccttttccatcagtgaaattctctacaaagccttttcctgcttttgatatccccagagcctccttgtcgttgtttgtgtgatggactgcagtggtgacatataggctatgtaggctgctgggtggttcttagggagatgacccctaaataatgccttaaagactgactggttatcaccatttcccctgggctttttttttggagacaaggtctggctctgtcaaccaggctggagtgcagtggcgtgatcacagcttactgcagcctcaacctcccaggctcaagtgatcctcccacctcagcctccctagtagctgggaccacaggtgtgtgccaccacccctggctaattttttgtattttttaaaatagagacagcgttttgccctgttacccaggctcctgctaggctgctatggttagtttttcttataggaatcaagagttctggccatgtttatactgtgtctcttgtgagatgagtatacaagatggtatcctgacattcagaagtgaagttcagtggtggccaaacacctgtcaggaagcaggaacattctggaatgtactagaaccttcagcacgcccgatctccttgatttctggcgaacagtcattctagtgttgctcctcagagtcctctatgaatgctgcttctagctgtcatcaaagcgattggtttttaacccaggttgtgtgaatcagaaacacctgggaagcttttgaacagctcagattcctgggggccactcttgtgtgtaggattctgtttccgtaggtagggagcagagcacaggcagttttggtttttacaaagcattgtgagtggttctgatgcctacatcctcctggtaaaaaacaaacaaaagatacccctcttatttaagccaagacatttatttttttacttgagtaaaccccatgcgtgttatttgctggcttctttctcattttttgttacccctctaaccatttgcagtccagtgccaggatttttcttgtttcgtgtgtgtgtgtgtgtgtgtttgtgtgctgtgcctgttttgtgttttaaaagagtctgcagttacactgcatcaggggaaaagaacccccagtggttttttgactagaatcagctgcaaactttttgttacaatccaccgcagcagatctggaatccgctggtggagctggctgagagccagaccccgcggccccaccctgcctgggttattggacatgttgcatgcccatgtgccacgttcggctctcttctccagcacggagggggttgtggaggccgtcattggaccatgacgtgtatcacgttccatcctacaagtatcttgcgagttccccacatgcactcaccttcctagcgtggttctgggatgccttcctggagacccaagaggagatgcttccaccaaagttctcatttgatttggactccttttttacaatgcaaaactccatgctgtgtgtggggtggggtttgcagtgggaagctggggattgggagcagctgggaaagagttaccctctgttgacttttgtatatgtttgtcaggtacctgtttgttttacaactcaggcatgacattctttctggaaagtaagtatgtttttgttctaactcttaacccaggatagatcatagtgtatttcaaaataattcactgttttaactcttttacccttgttcccttttcaaaattcaaaaaaagtgcaccaggcattgtaaagtgagtctaatacttgtatcactgtcattatcatcctattttaaatgattactatatggcttgaagcatttccaagaccatttaatatcttaagtgatgtgtatttgggaataactctctccctgatcacatcactgtcccattcataatggcttttgtcgtatttgcaagcaagatacgttattagtatgtatacacttacaagtatttggacagtcaaaaagtgtcattcatcaccatctgcatatatgtaatggaaagaggttatgttctgattccagtagaaagttttagacatctcatctcacttccttttctcctcttaaaaatggctttgaaatactaggcctctggcagcacacagtgatcattgagtataagaagcattggcactgaagtggttgatttcgcatgcagtcttaatttaccgtaaagataagaggtttcaacaggcatagctcttataactgtgtcatttttcagcatctgtattgaatattttctattacatgaaaaactaaggctatattgagtctaaaaagtaacccctgctattgaaaagaatacgttctgattttgaatataatctgaaggaaattaaatatgtaatttccgaatttgcaaactctccatagaatatgtgctataaaaacctcagtgaaatgtactccatagaccaatagaacaagtagattgtacagtgtatacatttgccttattcagccgtgcaatacagacctttggttggtgtgtgtattatgagtgtgtgtacttttttttaatcctctctccctctctctctctctctctacctctctctctccatactgtgctcctcatactaaaggctgtgtaactctagaaattgtcttcggtttggaaaaatattaatggcaacaccttgcatttgtacagtactttgtagtttacatgcagtttagcctgctttgtatttaaaagcagaatggtgttcaagtcccaacattgctcctttccagctggatgacctggggcaagagcccttaacactgagttcctcatctatataatgggagatgggtcgggggggctcactggcaacacctatcctaaaggtttacaaacttgatgcattgaccaaattggataatataaatgaaaaggctttgaaaactatgaagtgctataccaatgtatgtcattattgtttttctaaccaaatttgaaatattacgtatgaatgagatcactgaatttgcagtagtactcttctatggctgtgccttagatagacttagaatgctgagtgtatccagccatgctggcagtgttcgatatggtgtctgtgtgtttatttttaacgctatgaccttgtttcaagaaagatttgaaggcagctttaaaaaagatgcatgtactatatcaagataaaataaatttaaaatatgtttaaaaataataaggcaaagggaatacttttcattctgttttccaaacttttccattcttgccaaattcagtaaaattgtacacgattgatagaaactatacctacattgggttattttgccctatgatgagaattgactttgggaaatttgtagtgcaagtcgcttgttgcattctttaatgtagacagcaaaaatatgactaagaatacaagtcattatctaaatagcgctaccttttgaaaaatgattttaatgacattttgtatggttgtacttaagttcctatttcgaattaatttcattttatttttttcaagattgaaatgcccttatgaaacagctgtggaattagctgctctctgtctacaaggtacattaatctttagtagtaattagcattttaatgttattgctttttatttcaacaaatgagtgtccacagtataccaggcccagtgcttagctttggggatataaatgaatatgacacggtctctgtccccaagtggcgtgcagtccagtgaggaaggcaaggagtagcaaggactgcagtgcagttccttcaggaacagagacgtgcaggaggtttggacaaggaaggcccattgtggggatgagaagaccatgagtcaaggaaccaaggcacaaaagtgcagagaggttagcagcagttgagtgatgctacagagtgaagttcaagcatttggacaggtggatgacctcgggccccatttaaagagaaagaatttcatgcagtcagcagtgacacctttgaaagctcttaagagggagcaggcctggccggatatgcactttagaaaggccacgttggctatatggggagaagggatcagagcaggaccaagactgggactgggagtccagtgaggaggtgctgctgtaatagaagggaaaggaaactaactagggcaggggtttgcacacacacacacacacacacacacacccccacacacaccaagaaatagcattggcagtacaaggagaaggacttggtgattagacttaggtgttgagggaggagtttgagatgattctcaggctgtttctggggatggatagaggttagaagaggtggactctggtggaggaaatggtctgtgttgggtcccttgactaagaggttctagaagctccagcaggttcttgagtacctgaatctggctcactcagagaggtcagactggaagcattaatgtcaggactggtggggtgcaaagggtatttttgcatgtgagtgggaactggatggtaagaggtctgcctgcatgattgtcagcattggccgtttatctgtgtgatgccctggtggtgtgtagtttcggatgcagaagaaacacttgctaaagtctctagcactaattaagagaatactaatgtgtaactgcatatccgggatttcattagtacatcagatagacatatgttgtgcactcatttgccagcatgttcatcagcttctactggattatggattatgacatattcattcataattagtaattacttatgaataccataatgagaattgacttctcacttttgtatttggccagtttttaaaagtggaactgagaggttttttcaaattataaaattagtacacacttactacagaatatcaggacaacaacccaccaataagacaagcataaggaaggaaggaacccactgtcctaccacccacaggcaaccagaatttctagctatgagttttgagtggacttttgaaaatgttattttgatcagtcatctgcaaatttttgtataattttttttacttggtatttttagtatgtgtattttgtcatgtgtacactcatagagatggtttttaatgaccgtaggatgctcccattacctgaaacttctattcttcagtcaccttttaattcctgttgtcttgaactcctggcctcaagcgatcctcccacctcagcctcccaaagcactgagattacaggcatgagcaacctcacccagactcttaattcttattatctaatggggacttggcatatagtagatgcttggtaagtgcagagtgagttgaattattgaaattggagagacccccctcaccccacccccgccaagaactttaaaggcagaacctttaaactggtggtagagttgatggtaatgtcatctatagccatctgtgccaaatacagtgctcagtgcttccgatgtatttttctgatatgacagtctttatggcaagtgctataacgacaggcatggcttggagaacatggccgtggcctccgcactccggccactcacccacttagcaagtggctttcctctaccccagagttcctgagctgccagaggtcacaccatcaggcttgacagcccagcagtagatgtcagggtgtcacgaatgagacaaaagagacggaaggccattaatccactggaaaggtttcctcctaaagccattggcacaatattgcaagcttgtacgttgtcctgaaagatcagaggatgaggtgcacgtattaccatcccaccccattgcaatgaagccctcaccacacttaacagagtagtgtagaaccaaaaccttgccccagagccgagacagacacaaataaggtcagttctctgtgaccgttcttggagaaattatcctttgagctgaaatcataatgtcagtgtgattttaagatacaattgttggccgggcgcgatggctcacccctgtaatcccagcacttcgggaggccgaggcgggtggattacctgaggtccggagttcaagaccagcctggccaacatagtaaaactccatctctaccaaaaatacaaaaattagccaggcatggtggtggacatctgtaatcccaactactcaggaggctgaagcaggagaattgcttgaacccgggaggcggaggttgcagtgagccaagattgcattactgcactccagcctgggtgacagagcgagactctgtctcaaaaaaaaaaaaaaaaaaaaaagatacaattgattgttatgtcagatagaaataaaaagacttggctgggcatggtggctcatgcctgtaatctcagcactttgggaggctgaggtgggcggatcgcttgggcccaggagtttgagaccagcttgggcaacatggcaaaaccctgtctctacaaaaaatacaaaaattagccaggtatggtggcgcatacctataatcccagctacagactgagctgggaggatcacctgagccaggggaggttgaggtttgaggttgcagagagctgtgatcacgccactgcactccagcctaggcaactaagaccctttctcaaaagaaaagaaaagaaaaacactgaagatttagacacaaggcgaggctcttgttacattgtccctccgtgccccctctccccaaccccattccatgagtaaatgctacagtctgctttccacctcacccacagctgagctagcttgtctgggactctaaggatcactagagcatctctgtaggtttgaataaaatgaagggttgtgtttcctcctgtgcttgagccttgaagacatgtcttgctgtggttgtcctcgatgcctcctgagttgtgatacagtggccctgcagggaggctgtgctcttttgggaactaaatttgtggtggatttaaaaattaaaccaggtaaaaggaaaagaagggagaactaataggccactcatctgttgcatgcctgtgctcctttttcattcttgtaacaattcccattttacaaatcaggcaccggagacccagagatgttaagtgacttgcctgcagtcacatagatagattatgatagggttgggatccaagtcctcttgtgtctgagctgtttccaccaccctccacggcctcctagagctgaggcctggctgcagagattgcaaattgagtgaagtgttagttgatgggatctgatgtgtgcagcagaggttcttaaagtgttttccagggtcgccacattagcatcacatggggacttgttagaaaagccagttcttaggccgggttccagacctagggattcaaaaactctgggggcggggcccagtgatgtgcattttaaccagctcaccaggtgattctgatgcgcacccaaattcgaaagccactattatacctcagtgatttttccaacaaatgggcaggcctgtgacctgggcatcttgttaaaaggcaggttttgcttgaataggtctggggtggggtttcaggttctgcgttttgggcaagctcccaggggatggcagtactattggtgtgtggtccacacttggtgtagcctagtgttagagggaactctagaggattccttttcattctggggtctgcttcctgagctgcagggggtgggggagagtggattttctcatcatccctggaggagggggccacctgtatcctcaggccctccatcctgtgggggacttggcaagggcagcacaaattgcagcacaaattgggcttcttgctcggatcactcgtgtggctgctcctccctcctttctgcacagctgtctccctcccaggttctgcctgacttcccgcagttgctcctgcagccctcgcacccctcctccctgcctccctctcgctctgcctctccctccccttcctactttccccctggatgctgcatgtgccgaattcttgatctatcctctccagcactgcagaccctgaagtgctgctctgacctactcttaacgagaggcttgttaaatggatgtttctgggcagatcctcattccctgcaattgccttttattgcaaattcagggttctaccccttcgtggggaaaatgtaactggtgcttccctgggtgggaacaacagtggagagaaagacagtaataactaggatgatgctgtatcacccaacagggaggacattagaatgcttctaggattttgagtgtacatatgactacccaagtgagagttaagtcttcccgaaaggagagagttatacattggggcggggggctgtgctttataatgatgcaaaatgcctttggacctggttgcagcaataactgaaatcattcaatgtctcctattttcctcccttttatgaaacttacagcggagcttggggagtgcgagcttccagaacacacaccagagcttgtgtctgagtttcggttcattccaaatcagacagaagcaatggaatttgatatcttccagagatggaaagagtgcaggtaccttgatgcaaccgtctagcattctgatgtatctattttgtcataaataagtgttgatcacactcctttatctaccagtagaattgttctgttgatggccataaaactgcagcgccaactcttctctccttgtgtcagtcctgtttttccaaaggcccacatcttgtcctttttatttttgagagagtctcgctctgttgcccaggccagagtgcagtggcactatgttggctcactgaatcctcgacctcccaatgctcaagcaatcctcctgcctcagcctcccgagcagctgggattataggcgtataccaccatgcctggctcatttttctattttttgcagagatgaggtttcaccacgttgcctaggctggtctcaaactcctgagctcaagtgattgtcccacctcagcctcccaaagtgttgggattacaggcaggagccaccacacctggccgtctgtctcttaagagatgtgcagcaagaaccaaaccacactccttttctctctctgcaaacagagcctggttctgatttgtttattgcggatgggggagccaccactgtcttagtgacaccccagggcatcccaggcactctcacatacctgcatctctgggacctcagggcctgaaccttctgaaacaagccctaaatttagaaatataccctgttgtataggaacatacatatttgagaccgtgtgctgtacagtgttacatttcaggaagtgtgatcatcatacctaaatccagcagtgtcatttatcccctttgttttttccctccattccccctgcaggcaccactttcatgcctggactaccaacgccacccctcactcacgggtttcctagatgttaacctttcctccctcccatcccatcttccccaaacactgcctcctccaggtcacccttggactctggagcttagcatgactttctcttatccctcagtcattctgaaaagctcctgtgactattttagtggaaggtggcattagtccattctcattgtgtaacactgaaacaacgtaaatgtctgcgggtatggcacaccccacccacacacttacacatccactctcctccctgcaggaagccatcattggcagcctgtagtcttttccttttgcatttacatatacaacttgttttgttgtttccttaagtgatcatattgtaagcactgttctgtgattttgttgttgttgttgttgagatggagtttcagtcttgttgcccaggctggagtgcaatggcacgatcttggatcttggctcactgcaacctccgcctcccaggtttaagtgattctccttcctcagcctcccaagtagctgggattacaggcatgtgccaccacgcccagcgaattctgtatttttagcagagatggggtttcaccatgttagtcaggctggtctcgaactcctgacctcaagtgatccaccaaccttggcctcccaaagtgctgggataacaggcgtgagtcactgcgcccagcctgttctgtggtctttctagtcaattaacagtaaggtcttgggaatctttttgtattactataatttggcatccctcattgctttaattgctgcataacgttccatagtaaggccgtgcccttcagaatcctgtgggcttacgagtcgcagtttacatgtatttccattggtttttctaaggggaaagagccctgcccaggcggaactctcctatctgaataaagcgaagtggctggaaatgtatggggtagacatgcacgttgtcagggtaagaactgtgtgcgtttaagtaatttggttttgctgttactgaaaaatgtatgaacattatgcaaacaaaataacttgtggtgaggaaactgtttttgcattttgcattctgctgtgtgacgacctgttagaaccctctaccgattgtcacttcgtttgtttgtagggaagagatggctgtgaatattctcttggactgaccccgacaggcatattaatctttgaaggagctaacaaaataggcttattcttttggtaatttagttttgtctaatattaaaaatgtcttttcctattttgtggtggaattctatgtgatggatgattattgaggggtatctgcaacacccagattcatcctcagagcacacggtgctgctgttgtgggtctgtggcagttgcgctgaaacttctggataatcacacttggatgaatgtttttattttttttttagtctaagctttaaaagtagaaaggaaactgctatttgatgtgtagatagttttactgcagattgtgcttttaaaatgctttctgtctgactaggcctaaaattaccaaaatggattttaaaaagagcaaattgacactcgtggtggtcgaggatgatgatcaggtaggcctggctcccatttcttcccccttgctgtgaaaatcctgtgttggggttgcaaacgcccactcgaggcccttgtgcttcctctttaagggacgtgagcaagagcacacgtttgtgttccggttagacagtgccaggacctgcaaacacctttggaagtgtgcagttgagcaccacgcattcttccgactgcggacgccaggaaacagcaaatccaatagatccgactttatcaggctgggctctcgcttcagattcaggtagggagccatttctgcaacacggatcacgtcttctgaaggagggcaactgtgatttctttcttgtatgcgaatagagtagtggatttgagtccagaaacttaggttgtgtgtcccatccccacgtttcttaaggtgagtaactgaagctcttttgacccccacctggtcattgataaaatggaactaataacaaaattgttaataactgacatttagtcagagctgtgctgttcaatacagtaggcactagccacacgtggcaatttaagttaatgaatatgaaataaattttacaatgtaattcttcagtatcgctagtcatatttcaagcggccaagaagccacatgtggctagtggctaccatattagacaatatagacacaggacacaggatcattttggaaagttctgttggccagcactgtgccagaactgttcacacacccttaataaggtaggttgattaaccccattttacagataaggaaaccagggccagaggcattacgcttaaaatcacacacagccagtaagtggtagagcggagattcaaccctgtgaactctggctgttaaatttctaactgctactgtattgccttttgcatgccaatgtccagaaatttggggtaattaagaatgagagcagatatcaatgtgtaacccaaggtaggatgagtagatatttgaatctgaaaagagcctgaaaacatcaagagcttattctgatatatttttgcttatcatcctaagaccatttttctcaaagtgtgtgaaaactttcttggtgtttgttaaaaatgaggacaacaacctcatctgagacctttgcagtcagaatctgtgggtatgcatgtgtgtgtatgtgtaaggcctggcagtacgcatttaaaatgtgctcccagggtttttgaggcctatttacatttgagaatctcagttacgatatctaaaacttcacatggtttcataacctctacccacacatggcacatccctgaactctatttaaatgccaaaagatttgctcatttcaaatgtttctactgtgtgaggaaatagctatgaacttctgtttaaagaattattttgttttaaatgctccaaggggtcgggggcggggtggggggaagaccaagctctttttgagaaacaatcaaatcccagggtcctgtggaggatgcagaggttaccggagacactccacagaatgctggtgtctactcggagtggagtgaggcgggaaggacagtcagggcagttgccaaggcaggcttttctctcctgggaggaaactgccccaggcttagtcccagaccatgttcctttctgctcctctggaagtgtaagaaggaagggagtttggaggagaagaggttgcccttagaggcacacagagcaggtgacaaatggtgactaagagcaactggaatgaagcagttgaggagtacatcagacgaaaccagcaacctcctggaatctgcagccgggtgtcacgttggttgaaacccaaaaagccttagtgaaatcagtaatgtttgccttggcatagcaaagaaagctgagacctagttaagtgggtattgataacagtcttctaaaagatgggttaaatgtctatgcagtgtgttctgtgaaaggttattttatgtgaaaatcaatgttctcttaatgagatgtatcaaacctgcttggtttgtgcagccaagtggctggtacctaaattgcaggttttgccctttggtggaaatatctgcccctggactgtagcctggacttggcaaaggagattttatttccaaatggaaggttaaactttgtgtttctttacccaagtgagttcaggctaagttgaaacgtacgttggagctcttggaaataaaagtgcactttcaaaaacaggtaatgtactgagattctgatattgataacacacgagaaaatatttacttcccagtgggcggacagaatatcaagctacacatggctccaggttacgaagaaccagcacctttgagaggaagcctagtaaacgttatccatcccggagacattcaacgttcaaaggttgtgtgtttttcattctttcttggaattttacattatgcttgagtcatttaagccctcgaggagcttggtcaagcagcttatgaagaaagtacccgcagttctccagtctggagcttttggaaaaataatcccagtggtgttcttttaacgggacctggccacttccgccatccctctgtcattagtgtttgccgtggatgtgttcatttatttctcccctttctccatatttctttccatgtgcctctttgcttcttttagacctgggctcaagccccggtacctcaggaatatcacagggaaacacctttcttgcctatagaagatactgtatctccatcatcttgcaattttaagtgtggacatcaggcccatgctaactggaattctgaccacgtacaagtacatgaagaacttttagatattcggctcaagtcccacagtcagtccaaactttcctcacccttaaatttagccaggccctagaatgcctgcccccttcccctttccaaaccccttcaaccttgtccatcagttacagctggggcctcatacctgtatgaggcccggaacacagtacaactcagtcagtgaatgagcaagccaggctcatttctgttggatcccagcctccagatcccatcttgtagctcttctttctctacactaggttgctccccgacttaggacgcccagtttgtactcagtgtttgctcttttatggcagagcctctgcactcccagcctcctggccccttctgtacatgatttccttgtggccactccatgcatttttcttggctcaggacttagtgggcctccatgggacttggtacctctacttgttcccttctggaatctgtaactttgtgttccccaccattctttcctttatgaaccgatggtgcaacagcatgactacctgaaattcttagtcactcccagctgctttagtggagggaaaatgcccacagcacaggaaatagtcctgcccttcgagagaggccaggggatgggagcgtgtccagagaagggcgatgggttgatgaagggtggccacagcgcccgggaggaaggggccagaacgctctctgttctgttccatgaggaggattatgctggtgtgtgtagtccactggttcagagttgtccagaaatagctcagtgtaaggaacaattttccaaagatcaaaagagctgtctcaagatagcagtgcgttcccagcccctacaggtgtatacagcacaaagggagggaccccctggtgtggctgtcacagagggaagtggacgtcctgtggtttgaccccaccagatggctttagagatctgggccccagggtctgtgattcttttccccctccctcttttctctcccttatttcactgacttttttccagccagagttctagcatcttctttgtcaagcttttaatgattttccctgccacatctatccttttaaaaacaaaatggagtgtaagcggctaagctgtacctcattcccagggctctgtccatgcaggccctcacggcgtccccgaggcccctcagtccagacccatgcttatattgcatccctgatcaccgtgtgctgttttcccttttacccacttctctgtatctgcctttctctgtctctagacagggaacttcttgagagcagagactgtgtctctttgtccctgcctcccagagcgcccagccctgggaacctgctgagtggatggttgctgagtgaatcagagggaggggtagtttactctccctgaggaaaggagaagtagccaccatgcagttctgcctgggttggagttggaaaggctctgtgatggtagaagtctcgcatggccattatctgtcattgcatggtgaaagcgataaagttctctaagatgtcataactttctgtttttcctttatagcaagcaacccagtgatagcagcccagctctggtgagtgtccttgagctctagagcacagctctcctctctaaggatcgtatttatttgcaatgttgactttttccttactacagtgaaatcaggaagtgtgtcatctggtaatttttttcccctttttctgctgcctggctattccatgctcatggctttcaataagtacacaatataatgttccaagacagtttggtttttttggcaaacacagctgctttgtttgagtagctgtgtgctttgtttatgataacagtgggtgggaaaggtagaggcctgtgcgcagcacactgtgctcatggcgtggcaggcagtgctgggagaggaaggccttgctcgcgagcaaaagctggacgagagcagatgctagatttgctcagtgacgtgcaggttttacatcatagaagacattaaacacctttactgaaattcctgcaggaaaatgaacttatcacaagagtgaaaattgccagcacaggattcagcaaacattttctgtaaagggccacatagtccatgtttgagactttgcaggctctgctgtgtctttcacagctactcacctctgctgttgtagctagagagccgctgtggaaaatatgtaaatgagcgaacgtgactgcattccaataaaactttacttataaatatcagtggaccagatttggcccaaggggtatagtttttgcaggcctcttccctggcacaggtgtccagggtcttgcctgtatagtagaatgatctggtgagcataattatctgaaacatcctccgcagccacaccccaggcgcattgaatcagtctctcagggtgggacccatatagcttgtttttaaagctgcccaggtgagtctgcccggcatataccgctcttgctctctctgaaacaactgcctgtcttatgtgagttttggcttgttgagtagacaagctgtcatgtgagagaaccacagacttgcattgtttggacctttggtctgaactgcagccgctggtaggtaggccaggttcattaggctctcagtcatcccaggcgcaggtctcaaggcggctgagagggtggtctttgagatgggcacagcttgactgtgccatgcactatcagtcaggacagttggcaaaacgtggcacggggtggagcgggttgcagataccccggtgagcgaggagagccctggctgaggcatcaggaaccctccctccaggtaccagctgtgttctaacccagctctggagacttaggccttcctacttctgggcctccgttttcttttttgcaaatcaggaggttgggctagatcagtgtttttccaaactcttttaccctctgattttcaccctctagaagaaacctgatgtcaaagcccaaaatacagaacagacaaatgtggaggtcctccggatgaagccgagtggggagggagaggccagttcctgcctgctcttctgccactcctcccaccccgtagctccagggcaccttcaaggaacccagggttctagagaacacagctggtccctcatattacacagctggaaactcaacctcgcatctctgattccaaatcctactttcagcgtcattctgccttttgtctctgggttttgttctcagcatctgatgaaggggctcaggggtcctgttgaactgctctgtgtcgccccctgccccggagggtgggaggaggttgcagtattctggatgggttagttgtaggtccctagattcaccccatttttaggatccttctggcagatagtatgccaaatggtatctgtacctttcttagcttgtcggggtgtcttgcttttaattctctggggcttgtaagttacagccccaatttctttactttgctctctaaggtagtgattgttttgcttgtttctccctaataaaattacattttcctcccagcatctagtggagattatatattgggaaccaaaacaaactaaaaaaaaaaaaaaaattctgcccaaaaaaaaaagccctgataaatataccctttaggaacaaatgagctaataactgctgttcgcagctgttcaattgctcttcacagcctgtgggatcccagggtgagtaggattgctgtgggagccgtggatgaaattgtgctctgggctccagaggtactactagaaaaatagcaccttgcggaacgcttaacttacctgatgaagtccagccagaggtgatctggttcagagcctagctctgtgtactggtcctccctgaaaaccagaacacagagccatttagaccccaagcaagacttataacaatgatctgtttgcctctcagtgttggagaagccagcaataacacttgatttcaagcacacctcctggcaataatgattgcctgctctgtccatatatatacatatatatatatatatatttttttttttttttgagatggagtctcgctctgtcgcccaggctagagtgcagtggcgcagtctcggctcactgccagctctgcctcccgggttcacgccgttctcctgcctcagcctcccgagtagctgggactacaggtgcccgccaccacgcccggctaattttttgtatttttagtagagacgaggttccaccgtattagccaggatggtctcgatctcctgacctcgtgatcaaccctcctcagcctcccaaagtgctgggattacaggtgtgagctaccacgcccggcctatatatatatatttagcatttaagatctcatcagccaagcacagtggctcatgcctataatcccaacactttgggaggttgaggctggaggattgcttgagcccaggagttcaggaccagcccgggcaacatgtgagatctcatctcttaaaacaaacaaaaagattccatcgaaataggatcatgatgaggagccctgagccttttctcagtccctctaagagccaagttggtttagcagaaagaagacaggctttaggattctgcagatgttgattctagccctggctcccactgaccagccaggcgaccctgagcaggtttcccaactctctgttaggcaactgttcctttatctgtaaaacgaggtggtcacatttgttgacctcatagccttgtcgtgtggattaaataataacagatgtgaagttcccagtacagagtcttgtctggagagaacattccaaagtggtggccagattattgacagtggttttaatagcaaggggacccacatgtggctcccaccacagtacccagtgggagatgctcaggagggatcggtgcctccccctgccgtgggaagaggctctgcgcatcactggagcttctggtgccggtgctgtgaggtctcccagcaatgccagggcaggcctgaaatgggagtaaaattacttggtttgcccaactgaaacaggacctcatttttgtcaccaaaatatgacattgagactgcattctggaatatttcctactgtttctgtttgtgagctctaaaaggacaagtgaaagttgctgtctggggttttccttgttatatgttcattttaaacagccaataaccaaaaaaaagtcattatgtggaagttcctattagagtatgtagcacataggaatagttcatgattgttaaataaatcattaataatgccactctacaacctatttttctttttttttctgttttttgtttgtttgtttgtttagctctaaaacaaatccagaagtccataattaccaggtaagatactgcttttaaaggttttctttaaagaaggaaaattttaaaaataaaatttaaaaaaaggtttttgtaaagtttctaaattttccataatgagcagtcatcatatttgtaatcagattttgagaaaataataacaatatttgtttttttgagaaaatggtaagagaagagccctttccttctgacccctgccacttcttggccatctgaactgcctgtttttcttaaccttgtcaactggcaagcatcagggacatatgtttaagtttctgggtggccacacacagccccttagtggcattcaagtgaggcagcttttggtcaaagtgtgttttaggcctagggaacatgagtcccttgagatgggcttccaggaaaggatgttttggtcaaatgtttgggaaatgtcacatctttcattccccttcttggattttacagtgtccactgaggtataaaagtactgagaaatcctgcaagaaagacatgttttatttttttaaatgtattgtttccccaaattatttgcgaattgctcccctctcacgcccctgattaaaaaaaaaaaaaaaaaaactagtcttgagctggcacggtggtgtacatctgtagtgccagctatttgggggagctaaggcgagaggatcacttgagcccaggaattcaaggctgcagtgagctattatcatgaataccactgcacttcagcccagacgacacagtgggaactcatctatttaaaaagacaaacactagcctcagccccttcatatcttttttaaaaaaacgctagcctcaacccctaccattttttggtagtggtgaactcattaacacgaatagatacatggtttctagaacctgctttgtaaagcactgtgctaggtgatgtgctaggcccattgcctgcaggaaggagcacaggtacgtttctatggctggcgtcttgctgtttctcaggacggccaaccagggcctgtgccgcctgccagctcacccatgcctggtaacatggaaggtgtggtttacagctcagcctggatcaagcacattcttcctaagccactgtgggtggctctctctctggccattcacagccttgtaccacctggttccaacttctctatttatttctcaccactcccatcacgctccatatgttcaactcacagggaattgcataattgttgccccataatttcttcccaccattctttgcccgtgtttgtctgcctggaattcctttgcttcctatcagtatattaaagtatctctcaaagaccaactcagagttggccacagtggctcatgcgtgtaatcccagcacgttgggaagccaaggcaagaggatcacttgagcccaagaattcaagaccggtctgggcaacatagtgagaccccatctctatttttaaataatcctgggttcaagtgattctcttgcctcagcctcccaagtatctggggttataggtgtatgccaccacgcccggctaatttttacatttttaatagagacaaagtttcaccatgttggccacgctggtctcaaactcctgacctcaagtgatctgctcgcctcagcctcccaaagtgctgggtttacaggtgtgagccaccgtgcccggccagggttcttgaatcttgttattcactgattgttttttgttaaggggttttcaggtgtgagtaactgaaaagttgtagagacaggtaattgataggtgatcagtgcttgaaggagagaaaaattttagaaaagcaaagcagctgagcactgcctgtgccctctccgcatagcctgtagtgtgttctcactgtgcgttttctgcttagagtgaacatgaggcgattgttgaaatcagatctactgaaactcatctaggcattgttatcgcaacatcattggcaaccacgggtcctttggaccttgccaatcttagaggtcttgtgttctatcaagggttgggaataaattgaccgggaagagaacgtcctgagaagtggcctgattggcatgtgaataccgtgaagggtatttgagaggatggtgttgcagcatttatcttatttcaagcactgcaaggtcagccagctgcaaaggatggatctctgtgttctcaatgaggacgctgttggcatttggggagggagagttcttcattgtttgggactgtccctggaattgcaggatgattagcttcccttttctctcttactatgacaagcaaacatgcacacagtcatttcccattgtcctccaagggatatgagtgtaccagttgagaaccagctgggttaacactaaaatactccttgacagttgagaatgtgaataaattgccagaggagaccaaggaagtttccaaaatctttttccaggtctgtggctaaggttcccacctctctctctgatgaatctgatttggttgtgtttaaagccagaggaaaacatagagggtccagttctaggtcagcctttctctattgttgaacagccaatgaatggaacctcattctgggcctgtctatgtgatcaaaacacctggaacagttagactctgggcaaatcatctaaactctgtgggtttctgtagcccctaaaggagaaatatgcagagattgcagcagggagatgctaaagccctggtcagctcccagatcctgctactgaggtattttctccagattccttttcctgcagcatgtccttccgggggctgcagagtctgcttgctgacaggcgtctttgaaggagaaaggaaaggctgcttgaatacagaacaggcagggagggcatctcaggtccatgaaaatggaacgaacagaactgctgagattctctgtgccagagagcaggccactgcttactaagcaaagtatcctgagaaggaggggaagaaataattaaaagagtaacagtggcaagactgtagtgacttaaatgtcaggagggcctaatttgccccttaggagattgagccttgagaagcccctgacttctgctgatgtctaggaccactgccctctgcaggccagaagtggaaaggcaggctgctacctagccggctagggctgcacctcagtccgtttgtgagtacagggtctgtgttctcttcttaaaatggacaacttccttcaaaattagcggggtgtggtggcacgtgcctgtaatcccagctacccaggagactgaggcaggagaatcgcttgaacccaggaggtagaggttgccaagatactgccattgcactccagcctgggtgacagagtgagactctgtaaaaaaaaaaaaaaaaaaaaaaaaaaaaaaaagacaaccttcaacctccttccttctcttctttctctttcttccttcccttcccttctttttctttcttctctctttccctacctgccttccttccctccctcccctcatcccttcttctcaaactctctccctccctcctgttttatcaggatgataagcgctctggatggttttgtttgttttggtattttgttttggattgcattttagaagattatttttattgcataaaccagagagaaagaaaaaaccttcacccacggccctgctgcttcacttagcatccctgtccagtccttgtctgtgtgcagatgtaactgttccacatggtcattgtcattttcagcaatgacaaaaattgtttctgaagagagaagttgcctcccactctccccatctctctgacaccttccgcctcttcccttgggaagatgaatacagcttgtctctggtactccggacgacccccttcaaggccggtgttgtcaccttctaagggcagcttcccagccccttcacagggagccgcctctggagagggcaagaaccggcactgggtgccagcccccagcctttgtcagagggggaaacgtgatcgtcctgggaaacatccaccccctagccagggtctatagcctttccattcttagtcccccagcccctcgggtggatgccaggaacagacaaagcgaatgaggaccattgaaattaaaaggtcatcaaataatcaagtttggtgttttatttctagcctcaatatcatcctaatatccatcccagccagccccggtggcatcctcactctccaaatgtcaggtaagtgctggtgcttccagagctgcaccttcgaaagctttcctttctctagaaaagttcagattctgcttagttaggagtagaaagtctgcatcagaaataacccttaagggatgcattgtcatggccgagatgaataaattttcaaagcaaaggtagccagtgatgtgtgtggatgtatcaaaggtatgctttgtgaaataaaaaatgaattgattttttaaaatcattctgatctcatatattcttggtttttagttttgtgttcaagatgttactgaaaatttctaagtaacatttttctgtcctgagaatttgtttactttaaatgtgatgaaagcttggggattttgttgtcatggggtttttttttttttaaggatttttttttttttttttttttttgcgggggtgggctgggggaatgagtttgctttttgtggcaatagatattttttccctaaactgaggggtcaataaactttttctgtaaaggatcagacagtcaatatattctgctttgtggtcgctgtcacaactccttaactctgccattgtactttgaaaacagccctagacaatccataaatgagaggctatggctgtgcttcaatgaaactgatttagaaaaacagtgggattgggccgagggctgccatttaccaaccttggccccaacctaccataatcctttctaagccaactggcatctgctggactgtgtttatagttaggcttgacaggttttttgtttttttttttttttttttaaggctagctttgtgaaagcaaatgttccttttaagatttgaattttagatcagtcttaattggtgtttatgtgtgaagctatttcagaaacatagttggcaagttcagtttgcataaaggtgaggttgctagcctttctctgagaaagtatggagaataaaatgctggaaataaacccacttagagcaaggccaaaaaaaagtttgttggggaattttgtaaccccaaagcgtgattgtttataaacacttggtagtcacttaactttttaaagcagattaggttagtggagtaataattctaaatcttactgtatttcaaaggtgctttattcttcagacgtaagaaacagaagagatttctagaaacgctattttaattaacattgtttttacaaaagtttgtgcttatcattgcctgttttatcatgttagtttccttctgaggcatggcctagaagcaggccttctgaggaaagccgtaaacagtgcctctctggggtgggcctgctgttggcagctttagtgtcatctggaagcttgtttaatgcaaattctcagccccaccccagacctactggatcagaatctatggggtggggcccaacattttgtgtattttcaagctctacaaagataccccatgaaaacagagtttgttagtccaacacttttggcaaatgctgcctgaggcattcatggtgcatgctggcatgcctccaagcagccctgtagtaatggaacattttccaccttcacttagctttctccagacggacttgacccatgagacaccctttgagaaatgatgacttgaccatagacagacccttgctctgcttggaagttcataggtgatctgcatctgaatttttaaaattcttactaggaaatccattcatttccattcatagccatccccattcacatggctcatggttccccctgccccatttcctttgtgcttgtgttgtttcacttacatttctgcattttcttccattctcccactaaccattcgctctgcaaacaaaacaggccatcctttcaggatgacaggtcgcattggaaagcatcggccagtggagatgacagccattttgattatgtccacgaccagaaccagaagaacttaggagggatgcaaagtatgatgtatcgagataaactcatgactgcactttgagagactgaagcatctctcttccattcaccttcatagtttcattgcattccatgaaaagtgtcttggcctcagatggatggatgtgtttggacgagtgtctttaaggagtagtcctgaaaggtgtttttggtgtccatgtaaatatttgaagataaaaccactatagcttgtcataatttactgttgactgcattctcattaaaatgaaggtaaaggctcaggaatcatattgatgttctgattttaaaattggagtcaaagtctatgtttatcattttactatgttcctgatgttctttgttatttaattaatgggagcaaataaaaccagaagagcttgggaagattgctcagcatatattcctgtcgtagaagttgagattgctagggtccagtttccctagtgtggcctggacgagtcatttccccttcattgacctcattttccccatctgaaaagagagggttggactaagtgatctccaaggtcctttccaactctaaaattctgcaatttgttaacatttcattttgtttaggttgaggacatacattcaaactaattttatcacaaggaaaactgcaatacccacttccttgacagagttactcctttcagaagctaaataaagtatataacttattagatgttatatagatacagggggactttgaatttcacatcttaaagcagttgagctactttgaatttaagcagtcgtactaatcttaaattgcatagcatttgttttgatcgaatttgctgctcaagtatgggaataatttttaatgtcttaatgattggtgctgctaacttgcgtgatttcagaagacataattgtgaatacacactgtcagaattgggggattggtttttaccctagacttcactcttaaaaagcaacgtgcaatcaagatcatttatggctcaaatgaaagcatataaggttttcttgaagttgtgccaaagcattctgtagagtaggatgagatggttgttgccctagtctgttggtagaaccagaaatcaatatgttgtcttttaggttaaagcttgtaccaaaatatttatttcccccatttcaagccctgagtcaaacatttttttctcttaataatagacctgaaatgttttattagtatttctgtgaaatcagttgattcttgtgccatttttgtatatgtaattgtaattttgcccatgttaggccctctaaaaaatgtttgacatcctttgagatattttattactaaaatctgatcttttttggctactgcaaaaatctattcagcaagaaggtatcagctgcataccttgcacagtggagctgactacctataaactctccctaaggcatttgtttacaggtgtattccattttagcagacgttctgatgctcagtgtatgtgctgcatacaaataaatgtgttctgaatcttttcatcttattgatagcatttttacaaatgtgtttccaaggaataaagattattcttgctttttttttgactccatcttcattttttttaaattgattcttgttgctatgcagaagtctcatttgtgaatgaccttggtaacagaacagttggcttttggaagtctgaaggtgagcattcagttaggtgggtggagcaagatcatcctagaatgaggctgctcttggcaagagtggatcttataggcacagcagctgatgcctttcttcatctggggcaactctggtgaaggttgtcctgcctgtcacaggtgctgagtagagagaagtggtggcagtgggatttcctcagtaatagtcctgtaaaggtacgtgtttgtcctggctacttgtgctcttcctggcaggaaggcatccaaacccttatctgtgggctcctggaaattgtgtatgccatataataccctctaataaatacctctctgcttaaagtaacttgagtggtttcagttgtctgcaaccaagaagcctcaccagtatgcatacttatgatatcctgattgttaaatgaagtgtacacttttcattccttaacttagtggacctttctctacagcagttgaccagttcagtcttaacagcctccttttctgccatcctattacctgttggtgttttctaaaggtctttcttctgctcactgctcttttcaccacagtctacccaagtcttctcattctgtcatgattttatcatgctgttgactctgaaaccatcctctgtaacccagactgtcctgtgaacttttggactgacatttcaacttgggtatcctgtgtacacgtcaaactccacctatcaaaaatcaaatcgatcatcttttaccctcctcccacaaaacttttcttctgcctgaattcccttttttacccacagtaagaatgtatacatcatctacaactcttctccctgtcgccacccatatccaaacagtacctaggtctgttcacctctgccttggtattcatacttgggctttcttctctcttcttactggcatggatcccataggagcatcttttctctggctcagaggtgcccttcctgatctccctgactccagttgctcctgacaagctcatgctcctcccagtcactagagtgatctttctaaaacacagtcggcctgtgccattgcagtgcttgccattaccctgaggatgaagtccaagggcctctcagtggaattccccactccgtgtctccatcctcttgctctagcatatatccaccatttctcaccctactgttgaaaatccttcaatgccaaattgcttgtggttcctggcatgtgccacaccctgctgttactcacatctgtgcctttgcaaatactgttctttctgcctagaattctgtcactcccatcccttcccctaactcctgctcaatgtctgcctctgcccagacatcttctcccagggactcttgacggccccacctctgcaaattgggttaatttctgtgttccagtaataaccccctccctttctacccccatctatagcaacgttgcacttacagctttgtattaaaatgggctcttttgtttatctcatcctgaaacctgtacactgcatcaatctgagctttgtgtcttacttgcctttgttccccagcacctgacagatagcaggtgctcagtgaatgtctgctcagcaaatggattattccacattcatttgaaaggagatgtctaaccagataacaggcaataatacatcatctctgggctggtctgaaggtatctgaacaaccttatccagtatgggggcatcatactgtgagtaggacactgaccaccatgtgacttctagattcagtttcatcatctgaatattactcagtgtgtcagctgtgttctcgtttgaggcattggtatcatgctgtacagggcagaagaaagtccagccacgtgacattggaaaccccggtaggtagacattgatctgcgctaatatataggggctagtcatctaatgctaggctttgcatgtgtcacttcatttcctgaccactctgtgagatgggtagtatcctgtttttcatagatagggaagctcaggcttagagtttaaccaagcagcctgtattccagagcctatggtctcaaccacagtggtctcttgcctctcacccttcatcccaccatttgcaaccgtggggatccatatctccatgagactgctagatgatgttgaacagttcactccactgaaatctaattgctaaccagagagccatccactccctccagccatctagtaacccctgtccatctgcattaccaccacaccagtaggtagctaactgtccatacagcccccaccagtgtggcctggtaaccatgttccctccaccatcaccactaccagtcataactgtccatatctcccactcacacacaccagggctggtaaccttgttcatctccatcacctgtgatctaataacgctgtttactgtcttctccccaaacacaccccctccagtggtctagtaaccctctccacaccttaccacccctcccccagtctaaaaatcctgtccccacaggcatcattcagcagtagtcccgcagagattggacattattcttaatgaaccactgcttatttgagacggtccactctatggcttccttccaaagagttcacaaatgaacaatgtcttctggaatattacttgacagtaaaaccacactcactattccataactaatggaattaacttttacattttggaactcgggtatgtactggtttatcatctattcatgtttctgtggtccctcagaacatccaacagtgtattgacagttgtcatttgattgatgtaattcatgccagaagtctctaaatcctgccaggtaattaattaccttggtcttcaaaacccttttgcctatttcgtttattggtctaccatttctgttgaagatggttctccttaaccacaaagatggaggaataaggacagtgtggtaattcctctcagtccttcttgcctgttaatattgcaccatccttccaggtcagcgactccagcctcctgggtcccgctctgaacacaagtaatgacagagtctttttgttgcccttgactttacagcttttaactagtcctttaaaatctgagctcattaaagaactccctgaacagccatattgatcccttcggatcagtatttcccaaacttaagagttgtaaatcaattccctggctgaccaagtcttccaaacgtaccaggaaaataccctacattggtctaggatgatttgcttccactctcttgctacaggaggcggtggacagatgcagaggcgaagcataagggggcggagagaaaaagcaagtcactgttaaaggtcccttgcacatgagaaatggcacattgtaagaaaccctggggatatcaaaaagacaaacatgtaaaatggacattcagctaagccttagcaaaagaaatcctcaatagttctgcaaataggcccacttctgccaaaattagggagctaaagaatggcttggacaacttactaaaaatgtggattgtggcattctaaatggtcagtggtaagacccaagatcctgcattttagcagcccaggacagcctgaggtgggcagtccaggtttgcttttcacttttggaaagcaaagctacttatctgcttgtgttcatcgttattttaatgcctcaattttaactctcagtagaggtcaactcttttttttttttttaaataggcataatgttaagtcaatggatggacacatcataataagtaactagatctgtctgctcagcaaagctatgcacttccttaggcccaaggtgaagcagaaaaatgcgagcattctagtggttctttatatggctttaatttcatcattaactggccccctgcaatctatcaaaccaagtgtgtgttctgccctcccttcccacttcagaagcaagggactagggaattccagctgttggagaaggactgggcgtgtgtatacaccagtctaagcacctgggctaagactggagcccatgattgggaaacagatggaagtttgcagaagtaaaatggcaagacattgccagccagatgagagaaggattaaagggtccacagtgtggtggtctggttttgtcaagggacaagagccccatagttctctgattaggtgaagtgtggaagctttggaatctcacacgatttgaatcccagctttgccacttactagccatgggacctttggccaatttcttctggacacctcattttcctcatccccagatggaatttaccagtatctcactgataagagaattatcaataaatgacattatatacaaaagatgttttgcgcagtgtttgatgctagatggtaagaatttttagtggttcgtaaggtcgtagctgtccatgtggacagaaacaggccaaagagattcaaaatagctcaaggccgggcgtggtgaatcatacctgtaatcccagcattttgggaggccaaggcaggtggatcattcaaggtcaggagttcgtgaccagcctggccaacatggtgaaaccctgtctccactaaaaatgcaaaaactagccgggcgtggtggtgtgtgcctgtgtagtcccagctacttgggagactgaggcagaagaatggcttgaaccagggaggcagaggttgcagtgagccaagatcacgccattgcactccagcctgggtgacagtgtgagactctatctaaaaaaaaaaaaaaaaaaaaaaaagtctagctgaagaaatggtatttctaatagattgatggtttgagatgtatattctaagtttacaaagggaaaggggtgtttggttccaaaggacagatcagatgtaagagcattaacacatatataaagacatgtctctttgaaactaacaaactcagagcagaaacaccatggggatcttttgaggaaagaaaaaagaaatagaaatgatatttctgtccgagaatactaggaaataactgtccaggcagaatgtggacaatgctttcccatctgcacatggcagaattggcatagagtaaagaattggtgagatggctgagagtccattctgctgctacgattgggactcagaggcttggagaattgaaacagagcgtctgctccattcccaccttgtctaatttgggatttcatcttagacgaattggaggaagattttaactatcaggagactgagtggaaagttagtaacaaaagggaaccactgtgctttgttgccattttgttgttgtttttgtttgtttgtttttgagacacggtctgtctctgtcacccaggctggagtgcagtggtgcaatcatggcccactgcagcctccacctccggggctcaagtgatcctctcacttcagcctcctgagtagctggcatgcaccaccatgctttgctaaatttttaaaaaatttttgtagagatggggtcttgccatgttgcacaggctggtgtgaactcctgggctcaagcgatcctcttgccttggcctccccaaatactgggtttacaggggagagctactgcacctggcctgttgccttttttaagatagataatacaaacaatagtaaaaattcaaatacaaatagccaaaagttacttttcctttccaccttcttattccccagttttccttggaagcaaacattgttagcatttttccttgtcaatctagagctactccatgtataaatgagcatatatttaaccaatcaatattgatggacatttaagctgcatcaactccctcaagttacagtggtgctgccattcttgtaccttgtgtttgtgcacttgaacaaatctatctgtagaataaattccctcgaagtagcatccaggttaaaaggtatgtgcatatttaagttggatattgtctaatgaaatttctctccaaatatattccacctgtttatactccccccagctcacagacacccccagcaattatgacaatgcctttgtgacctcacaggaagcaaatcatagcctttgctagcttttttttttttttaacttagtctgatgggtaaaatccagaatttctgttttaattacattctctgtgaacaaggctatgcaccttttaatctttctaaagacggtttgttatatgttttctgtgaaccatctgaaacccctattcttgagtcatgctccttaataaagatcaggctgatgaagtacaattaaccatgtcatcttagcatttataatagtgaggaaagggaaggcttgaatgagttgatatttaccagacatttttttaaaagtaggtttccaggctaagcgtggtggctcatgcctgtaatcgtagcactttgggaggccgaggttggtggatcgcctgaggtcaggagttcaagactagcctagccagcatggcaaaaccccatctctgctaaaaatacaaacaattagctggacctggtggcgcatgcctgtaaccccagctactcaggagtctgagacaggagaatcgcttgaacccgggaggcggaggctgcagtgagccaaaatcacaccactgcactccagcctgggtgacagagcgagactccatctcaaaaaaaaaaaaaaaaaaagtaggttcccagaaattcaggtaacagtcagcatgatactgccctgcagaactgaaaaagggaatgtgggcaacataaagatagcaaagggaaaggaattgattttgaatatctgtgtttcctttcctgtttgggagggtattgataactttccactcaggcttcttagatacccacccagacatcatgaatttccctggtgcattgaccaaggaaggatggatgtacttctagttacaattaaagtttcaatatattggaactgaaattacagccacatcccaagagtcacctgtggttttattggatgaaaggctgcagaatttaaaatattaaaactgctgtagtctaggccatccactaaaaaaggattagaataattagaggaacatccctgtaggctcatgttataagaaacccacagaaacctcctaatcgtcccctactgaatggtgaatggtttaaacatccacattctgcactgagacctcaaaagcaagaggtgttgctatgctaatgctcaaccagcttcattccctggctgaataatggacactgtctgtattaaaggcaattaaaccattaagcccttaaaattcatatcagtgttacagcttcggaggccaactaaggatgttcataatagaagcttctgaaaaacctgcaagaattggggaacagagagaggatcatttgcggaaatttttaagcactaatgaataccaaaataaattaatcctcatctgtatcaccctagaaacacgtacccagtgttcagctccaactctgactcacattggtgtcttgtgcaattagaatgtctaaaacctactcttaacagattatgcatcttattcatctaacctgaactacattccgggatgaataatgttttaatttcattcattcagtgagccggatggcgtctggggagtggaaaaataacacttcccagctcatgcctgagtctgccgtagctctgtcagagtgcacaggatgacaaagaatctgctttgtggacattattttacactcacagctgagctttcgtgacaatgattatttttgtcttactgtccctttggggtctctcatataacactgtttgaggatgtatttaaacaagtggttaggggaaagtctgttaatgctgttgccacctgaaaaaacagaataaaggcacaggaacacagaaatgagacgcaccaaaaaaaaaaatctgtaagaaacccagaagtgaccgggcacagtggctcatgcttgtaataccaaaactttgggaggccaaggtgggcagatcatttgaggccaggagtttgagaccagcctggccagcatagtgaaactccgtctctactaaaaatacaaaaattagccaggtgtggtggcacacatctgtaatcccagctactcgggggtctgaggcaggagaatcatttgaacctgggaggcagaggttgcagtgagcggagattgcaccactgcactccagcctgggcaacagagcgatattccatcaaaaaaaaaaagaaacccagaatggaaagtctagcttattagaagtgactgttgtaaggcaaaacaactatatttgtatttttttttctttaggcaagaaaaagattgaataaacttggtcatgagcctctgagcaaaaatcaactcatgaaatagtaattctctggactgcacacacatgcacacctgtgaaggcacacacacaatgaggaagccattgcaaaacctagcaagaatagcattgcaacacaacagcctttctggcagaaaaatgtcgggacctgcttacacctatttattgaaatcatttgatagttgtttgccaaaagaaaattccagactcagagatggaagcacatatcctgtcctacctcacacaggactcagacccaggaactactgaaccccaaaggctcttgtcagtccttaggatgtgggatgttaatctgcagttttgcagagactacataatgtagttaggaacaagtagggaattcatgtcaaaagtgcaacttttatgaatagatatttgataaattacctaaggagaattaaaatttaaatgcactaaaactaattaattgaataaagttctgctatgtttctgtgcagtgctggtatgttgaagaagatgccatctttggctccaggtaactaatcatcatcagatcaagagctccccatctagcatggattcatacatcaactgtgctagcatcagaattgcttgcaaagttgattggaacatttcttgaaagaaatacaaattggaaaagttttgggccaattagtctctataaaggaatctaaactacacccaaaaatgcagttttgacctttttttttttttttttgagatggagtttcactcgtcacccaggctggagtgcaatggcacaatcttggctcactgcaacctccacctcccagattcaagcatttctcccacttcattctcctgggtagctgggactacaggcgtgcaccactatgcccagctaattttgtatttttagtagtgttgagttttcatcctgattgttggccaggctggtctcgaactcctgacctcagatgatctgcctacattggcctcccagtgttgggattacaggcgtgagccaccacttgtggccaattttgaccttttctgaaaagaaagatgaagtagagtcaaccttctcactagtcttttttttagatataagaccactaagttgctataagaaatcatccctaattaatagatacaacattcataatgtatgacacttctaagatgtcgatacaattttcttcgaaaatccattatgaaaaaggtacagtgtttcaaatatagactctacttgttgccaaatagtatgctttccctgaattcaataagaacatgtaacaatgtatcagtctgtttagtctctaccaaattaaaattgaaataagcgacagctatctgggaaaccagaatgagtaaattgtactttctctcatctctcagtcggacatggcacagatcaaattatatcattgagctgtagttcctggcatacgaatgcttaatgtccaaaaatgcaatgtctgccacccagataagtgagttacctaaggtcacgtaggcaaacagcagcaaagccaagctaagtaccaatgcatgttccttttttgtcattagattgctccttccaaacacatggcaaagcagtattgcctagcaattcagagagcccaggttacctgggttcaaatcccagctctgccatttactagctacatgacttgaggaaagctccttggtctttctgctcctctttccttatgtataaaatgaagataataataattgtcctttcttcaaatggttgttggaagattaagttaactgatggtgaagtactgggcactcaaaaatgttagattttggggttttttgctctgtgaatatttaaagagcatgattactgcactggtgttcaatcaggaggtatgattctggctgacaccatctgctgtaaaaacacactacttgagtcaattatcctaagagagtcccaattggagagccacagttccgggcgaatggactgggtatggactagtggcagggcttcctgactttttcttgtccttggcacacatagaaagtgacgtatagcatgctgggacaagcagacaaggctgcttgaagctccaggctccccatgtcctgcccacttactccaaggactgggagaataaatggttcagcccacttgcaacccttctgaggcttaccagttggaaagttctactgaggtccttgtcagcttatccccaatgtgttaattctgattaggaatatggaattgtccccattgaggctaaagtaaaacaggaaccagtttgtcccaaccagctcctccagaaggtgtgtggagaacttgtgtgctacctgtgagtctactgtgtgggctacatatacactgatcccgccgccaggaaccccaacttggagtgaagacacatgacataaatagctgaggagtaagtccaagttcaggcagcacttgatacgtgtgcactgagcaatccagacgagatgtatgcgactttggataggggaagttcattgcatttcctactgcatcagctggcgtagtacctatgggggacttcttgaccatccagacatgggcattctgttaaaggcggggaatctgttgatttcttggcctgcatggctgatgatttggttacttaggaggtagaagaaaccctgcagttattactgttgtaaattctgttcagcaaggaagactgcattggaaatgtgtaagtaacaagatccatggaagaagaaaaccctgacatctcagaatcatgaacatgaagtgagtgaaatccagggcttaattctccacatattctttttcttcttcttgttgatattcttttctaaaattaatttgtgtgggtacatattaggtgtatgtatttatagggtatatgagatgttttgaaacaggtatgcaatgtgaaataatcacatcatatatgttttactgtttagaaaatccaatttcaaaatgtcatagaaaatagacttgaatattttttacatgggctgtgaatttagaaagcatagataatccgaaagagaaaggctttatgagcctctcagatgaacccacaatttgtaatagtattttaaagagtaggaaggtggaacatatgatcaaaaagaaagcggcacagaactttttataaggactccaaagttttgtagatgctcacttcagttggggcaaaaagatgagcaatttaatgacacccagttttgaggatggtatgtgagactaacaggcagaaacagagctacctgacttttgttgtgcttttttctttttcaacaaggaagctagtcactatactaactgcagagagtgaagagaacaaacagaagaaaattgaagtccaagataagagaaagagtagtcaggaaatattttactgctttttgattagctcaagtctttaggctcagaaaaatggtctcccaaaacactgagaaaatttgcacttgtcattgctgagtcagcatcaatacctttgaaaaagtcttgggaaaatgctagataagtagatggacagttttttttggaacatgaattccaaaaactaggctgataagctggagtgcaatactgaggaaagtttgagaacagagtcttttgtaagcacttagtaaaggaagcagtgttgacttaggaacagcacagatttgctgagaataagtcatgctaatctttcaagatttttagtaagctaagagtggaagaactgtctaacctgataagtagaatttatcagaaactgacatttaatggtgaaacactagataatgtataaacttcagaaataaggcaaggataactgctgatattcaatattattctggagaccttaccagtggaacaagccaagaaaacaaaattaggaataactactggaaaggaagaaacaaaattcacgtgattctcttcttaaaatccaagtgaattccaactggtaagagttgtgcaaagtggtcagaggcagaaatatcctaaagtcagcagctttgtatatccatctagtcattaaaaaattagacaataggggccaggcgttgtggctcacacctgtaatcccagcacttggggaggtcgaggtgggcagatcacgaggtcaagagatcgagaccatcctggccaacatggtgaaaccctgtctctactaaaaatacaaaaattagctgggcatggtgatgcacgcctgtagtccaagctactcaagaggctgaggcaggagaatcgcttgaatccaggaggcggaggttgcagtgagccgagatcacgccactgcaccccagcctgatgacagagcaagactccgtctcaaaaaaaaaagggggggatatgtaataattaataagatctcattttcaattgtgacaaaattgaaaaatacctaggaataaagttaatgttttgtaccttaatgaaaaagtttaaaaattctaactgaaggacattttaaaagatctgagtaaatggagagaaatatgttccttacgaatatattctttcaaattaatccataatatgtaatgctttaaatcagaactccagtgggattttttggaagtaacttgaattctggaattcaagaattcaagttactatcacaaaaggaatctagaagactaggcacatgataacagctaagaaaaaaaagaaaaagaatgatgtgagaaagggaataagatttataatgtcacatatgcatgtatatattaaaacaaaagtaattaagacagtctgatataggattagattagtagaacaataaaagtatgaagaggccaggcacagaggctcatgcctgtaataccagtgctttaggatgagaagtgggaggaccgcttaagaccaggatctgagaccagcctgggcaacatgatgagaccctgtctctataaaaaaaatgaaaaattagccaggtgtggtagtgcacacctgtagttgtaggtactcgggaggctgagagaagaagattgcttgagcccaggaattcaaggctgcaagtgagctatgattgtgccactgcactcttgcctgggcaacagagggaaaccctgtctgtaaaaaacaaatatatatatatatattcttcatatatatatgttcttcatatatatattcttcatatatattcttcatatatatattcatatatatatattcttcatatatatattcttcatatatatacttcatatatatattcttcatatatatattcatatatatattcttcatatatatatattcttcatatatatattcttcatatatatatatattcttcatatatatatatatatatatatgaaaaatccaaagagaggttttgattgtatataagtcatgggcaatccgaaaactgaaactactctaggcatttcttacagagggaatttaattcagggaattggttatacaagggctgaaaaaactaagaaacttaattggacagtgaggtaacctataaattagcaacaaacagaacctgcttatcactcctagagctggagggacaaggggaagtggcagtgttatagcacccaggagctaaggtagcaggaagacagtctagagggagctggagccacagagaactcatggctgcttttggaaacatcactggaggcatgaagaaatgaaggagaaataccctgacttgtctcctgtattcaccctccagtccatgtcagtgcctcccattgaccaaacctatgtaaaagccagaggacagggagcctgagaagtaaagtttcctgtaaacagtgtaagttgcaggggagcagagaaaggatctgagagcactcaggaaagtggcagacacatatgaagatggcatcacaagttcatggggcaagggtgaatgattctttgggtgatcttagaacaattggctctccatttcagaaaaagttaggactttacttcacaatatacacataaactcctgatgagttcataatcgaattgtgaaaaataaaagctggaagttcactctcatgccaacatggagctcaggcaagtcccctctccagttagcatgcattgccaactccaggccttagcacatgcagtgccctctacccagagcaccctatgcagtccctcccccagccactgccatcatccttcaggagccaggacctgcttcaagcatcactaccccaggaagtcttccttgttggttccacttgggttgggcacccctaccccatgtatcaaggtagcagtgagctccttgaaggctgatatggtttggctgtgtcctcgcccaaatctcatctcaaattgtagctcccacaatccccaagtgttgtggaaaggacctggtgggagataattgaatcggggaagtttcccccctactgtggtagtgaataagtctcatgagattcgatggttttataagagtttcccctttcacttggctctcattctctcttgtctaccgccatgtgagatgtacctttcaccttccactatgattatgaggcctctccagccacgtggaactgtgaatttatcaaacctctttcttttgtaaattgcccagtctcgggtatgtctttaccagcagtgtgaaaacggactaatacagggcaaagataacatctcatttgtctttatccttgtgcatggcacagtaccaggcacaagagctggccttcaaatatgtaccaaatgcactgatatttcattttgttctccgtctaaccagtattagttgagcacctgctatgtgcttagtacttttcttagcacagtggaggacacgaaaacatgtgatgtgacagtctctgttcctacagagttaactgtatggctgggaggacaagatacatacacaaggatgtcttagccagggggttctgaggaggacttggattttcctgatgagtgcacttgctgccttaaatagaagccaagacagatggaaagaggcagcagatgggcagcacttgaggcagcgagcagagaggcaggagtctggactgtgtcccaggatcaggcaggtacctgctgtgtgacctggtcacctccctccccatagcgagcccccatccccccatgtgcaaaatgaggaggttggactactacagcaatggttctcagccctggccacacattggatttagagatagattatgatgtaattagtctggggaagggcctgggcattgatacttttcaaaacctcttcttgtgatatttttatcagctttaagatacacatcaattgtacaacttaatgttttttagtattttcaccaagttgtgcaaccatcgctgcaatataattttagaacattttcatcacccctagaagaaactccacacccattagcagtcactcccccttccccccgtccaccatcctccctagtcctaggtagccggtaatccactttctacctctatggatttgcctattctagatgttttatataaatggaataatataatacttgtcctttttgtgtctggcttctttcatgtagtatatcatgttttcaaagtttatccacatcatggcctgctcaatatttcattcccttttgtggctgaataatgttcttttgtatggatagaccatgttctgtctatccattcatcagttgatggatatttggggtgtttctacctgttggctcttatgaataatgctgctatgaacattcacatgtaagtttttgcatggacctgttttcatttctcttgggcatatactagaagtgggcttgctcagtcatatggtaactaatgttcaactctttgaggaactgccaagctgtttttcaaactggctgcactattttgcattttctccagcagtgtataggagtttcccctggtttattttattttattttattttatttttattttattttatttttgagataaaggctccttctgtcacccaggctggagtgcagtggcacaatctcggctcactgcaaccttcacttcctgggttcaagtaattctcgtgcttcagcctccagagtagctgggattacaggtgcccaccaccacacctggctaatttttgtatttttagtagagacagagcttcgccatgttggccaagctggtctcaaactcctgacctcaagtgatccacctgcctcggcctcccaaagtggtgggattacaggtgtgacccaccgtgcccggcctccccctaggcactttaatatttatccaggttttcaaaccaccgaactggatgatatctgaggggctccatttctaaaattctgtgatttcttatccaggattagatccccagggctcccctgaaaagcccatgtcactcagagctgggctgagctgtagagtctgtgattggctttttggggcattgatcactcagccttgttgttgagagaaagccatgcccagcactggtcacaattctggtggtggattccagaggataccattatgcaatatgcaacaattttttttttttttttttgagacagggtcttgctccttgcctaagctggagaacagtggctcgatcttggatcacactgcagcctggacctcccaggctcaagcaattctccatctaagcctcctgagtagctaggaccacagtatgtgccaccataccgggttaattttttgttgttgttgtggaaatgggatcaccccatgttgcccggtctcgaactcctaggcccaagcaatcctcctgccttggcctcccaaaatgctggaagtacaggtgtgaaccattgcgcccggcctagcatgcaacaattttgactgagcaccacatgtttggttgtctggcagtccagggtcagggagaggagatgctctggttgggggtacatgtgggattaggcagggctggaagagcccctgtaacatcacttgttctgcaagcaataaagtctcttatggctaggccccagtaggaacactagcttttctggagttggaggccaaatgggaactgggtcttcccctgagaaaagggaagagaagaaatgagatcagggtcagttctcactctgcatttactaacagggcacattactccctttcactaagccccagtgtctaagggggcaccagcagcttccttgcaggaaaactgaaaattaaccattaaagtgcctagcacagtgctaggcacatagcagccccttcttccacactagatttcttttcaactgccagctcatgaaggcagagactgaagcctacatctgtcctctgtcacccaccctgaaaaccaggatgtgggacctcctttccagaatgccaggagtctcatgaacctcagtctctggtgatgttgagtgtgcagcaggcctcatctcctgggccttagccaaggtctctgagtactgctggaccttctagggtgggcttgacctctgaggtctctatgaagagggaagatgcgcaacctagtgaatgtcatttacattgtagtcggtgagtggcatctccaggagttccgcagggcacaatccatgaagccatgagcaaccccacaaaacttctccatgttagaatcttcaggatgatcccccaggcgtgtgagctgagaaagcacccgagtcattctactgcttgcttaggaacctttgctctgcgaaagacctttcacctgagcagattcaggcggcttcaggcagcttctctgaccctcatctatttctcttttcatttgtttctttctctgcctctctccaaagtagctataagatgaaggtcacacatgcatattttatttgacgtgttatgaaatgcactttctcactccctgcatatatatctttttactgtttaactctttactctgggtttccttgaaataaaaaagttttaaataccactcacttttaacttggaaagacaaatgcatgataccactgtgctcttccaagtccatggcagacatcaataatcaatcacagcactctttccccctgagttgggcacaacctcagactccttctgaatcttgcactccaagcagagagtgcaaatcaattggagttggcatgacagatgatatctatttgccatccctcaggaactcttactcaaagctttccaactccacctccagccctgaatgtacgccagatctctgctacaagacatctttccctttgggtgttcattctcacactctttgttacccacgtgatggtcgatcataattttctctgctcaaagcagctctcatttgccacctctttttttctattaatgacatgccatttgcctggtcctctaggctaaaaaataattggagttttctgacccttccatatctccacattctccctttctcaaatccagctagtatccctatcttttccttttgatgtttctctgatttgtccctcccacctagacaatgatggtgtcagacctttaataagctggcggcagcaaggaagaagggcagggtggaagacgagcccctcagttgggaagccctctccaggccttccaagcaaaggggaattttctctgttatgagctcccagtctctgcagctccttaggacagatattattttcaacatatttgcaagacaggaaaaatattaacaggctttggggtccacagacctgtcgtcaaatcctagctgcacaacttcattaatccatccttcctttcattcttccttcctccccctccctcccctcccttcttccttccatcaaatatttatggaacacctgctatataacaggtaaaggtctccatgtttttaaaagggaatcttttctgtaaaatagctagcacagtatctgagacatacagcaagtactggataaatagttgggggaaaggatgattctcagatacctaaatttgcccagaaatcgcttaacccaactcacgttacagctgagggaatggaggctcagagtgactgcccaagcttctcctgcaaagtaggggcggaactaagacttgagcccaggtttttccactccaactcagggcactttttgctgcctccatggggcatgaagagggtggatactctggttatgtttcaggttggagaggcgaggagggatggtgtttcccagaagccaaaatcgtgccttcttccacattcttacacacacacacgcacacacacatatgctcacacacaccaacacacgcacgtgcacacacgcacacacacagaaccgtccttgagcaaagtctccaggaggcagccaagatgggtcagagatgcagctcatggggcaatgtaggggacaaatagtgccatttcttctggactgtctcctgcatctgcaacacagtcctcaatgacacctcctcccaatgtccccaagtgacaggtctgcaagccctgcttacacagcttcaaaatatcccagaaggcagttcacctcactccatccaccaggttagtctagatcccgccctgcggcagtctcctaacagagagatactggagtctctccccaaccagtctcctccacacagcgctcaaaacaaactctccaaaatctaactcccttgcttaagccctttccttgataaccaggcactctaagcccttcataactagccccagcctgtcttagtctcccttcctgctactttcctcctcacttctccagacatcctgctctttcaaccaccgttcctttgctcatgctattccttaggcctggaacagctgtttctaccttttccactgaaaagaaattctacacacacaaatgacaaaataacacacctcctctgatttcaagcatgtgggttattaattggaaaaacccaagtacttcaagcaataaataaataaaggcatttactggagcttataatggaaaagttcagtggtaatgccagcttcaggtgtggctggaaccaggagctaaaatgataccattaagtttcttctctctctgactacctctaacctctgctcatcttgtctttctttgtgcattggcctcagtctcacagggactacttctctgtgtccaaaaaagatgttcacaaagagccctaacttccatcatccttacagccggagccagcttacccattacacacagtaggcacacaatacttagactcacaatactttcaggggcccacgaaaaggttttaaatattttttaaaataagaaaaaaatggattttccgttgaagaaaatgttttagtatatgttattaacatatttacttttatgcagttgtgaaatttaatttttagttaatttttatagaaaatggacaaaggtggccaggcacggtggctcacgcctgtaatcccagcactttgggaggcgggtggatcacaaggtcaggagatcgagaccgtcctggctaacacggtgaaaccccatctctattaaaaatacaaaccaatagccaggagtggtggcaggtgcatgtagtcccagctactcaggaggctgaagcaggagaatggcgtgaacccgggaggcggagtttgcagtgagctgagatcgcgccactgcactctagcctgggcgacagagcgagactccatctcaaaaaaaggaaagaaaatggacaaaggcaaaagtgcttgtggcacaaaaaggcacaataaggccctgcttgcctgttacaaagaaagagagagccttcctttcagttttcatgtgttaaatcttaggaaaaactctgattgtccctaattggatgacattccagaacactctcattagaaggatgcaggactctgattggccaggctcaagtctcaggcccacccctgaggaggaaatgtcaatcccatacaaacacaaggaatggggtttcctataagaaagaagattctgtttcaagaactgtccagcaaaacctaactgtcttcccccgaatgctctttcccttacaaacaccttcccccaggagaactgattgcttccacttctgcattttcttagcagtttgttctagtatgattgtaagtgactgaatcacagagcttcctactctggagtgtgagttccttgaagacagagtgaaagagtgggcagtagagatctgaaccatgggaatgagcagaaaaaggggttagccctgccagggaataagaggaagggatctttatctgggtcttaaaggctggaagtcttcctggaagaaggggtattttcactgggttgacagatgaggaaggacttcaggaggcaccaagaagtaagaggcatcgggatgggaaggagttagggtgggaagtagaaggatgtagcaggagatgaggctgaaaagagaaagggccaagactgggggcggggggaggtgctgtcagtgccacataaaggattgtggcttttatccttcaagccagggctcttcacctgggtccatggagaggctctagagggcctgatattgtgtgtagaatgttgtttgttggtacagggaaggttcgtggtattcaccagattttcaaaggggtttctgtcttaaagtggttaagaattattagtgttaggctgggtgcggtggttcatgcctgtaatcccagcactttcggaggctgaggcaggcaggtcacttgaggtcaggggtttgaaaccagcttggccaacatggtgaaaccccatctctactaaaaatacaaaaactagccaggcatggtggtgtgcacctgtaatcccagctactcaggaggctgaggcatgagaattgcttgagcctgggaggtggaggttgcagtgagctgagatagtgccactgtattccaacctgggcaacagagtgagacactgccaaaaaaaaaaaaaaaaaaagaattattagtattagagatatattcaagctccttgaagaaggagagcatggtctggaatgtaattagaatagcactctggcaattactctgtggaggatggactaaaggaacgagcagagacggggagagccagcaggaatctgttacaagagtctaggtgggagatgacacggccttcaaatggggcaatcctagttgttttttgttttttttttaaaaggaggtggtccactggaattaaaagatgttgtaagctgggcacagtggcttacacctgtaatcccagcattttgggaagcccaggagggtggaccacttgagcccaggagtttgagaccagcccaggcaacatagcgagatcctgtctctacaaaaaattttaaaaattagccaggcatggtgtcatatccctgtggccccagttgcctgggaggctgaggtgggagaatcacttgagcctgggagcttgaggccacagtgagctgtgtttgcaccactgcactccagcctgggcaacacagcaagaccctgtctcaagaaaaagatgttgcagcactgatgttaactggagctttctgcatgttgtgggtgacagagaggaagagaaactgaccccaagacttctagtttgcattatgatcttgtcataggattatttacaaatgattttttattattgtttttacctcttcctctcatttagagaatgcctttaaaaaaaagaaataaatattatttcatttaatttcaaatacttctttaagttacaagacttaaagtctctgatatatacaaacttccactttgctctttttcttaagtataatattaccattgtatatactttataataactacagatctagtttttgagtttatttctttcagtgtttaatgcctagaaaacgtctttgaaagtacacagagggcttgcaaggcattctgcttttctaaatcctgactgtgtcaccctccacagctacccgctcccttccccagtgcttagcagctcggaccggttgccttttggcattgaggagaatgggggcacaccgttcctcaccgcagcttcaggaaggcatcaccaccagcaccagcatcagcatcagcaccagcaccactcaaactacagcctctcactgaccctggagaacaaagaggggcctctgaggtccccaaactccagcagcaagtcccttacaagtgagtaggggtggagggggcaaggcaggagaagggggagcaatgctgcagggcacgagagttccctagattcttaagacagacccttgcggtgcagcacacaatggttgtcatgttatgctgggctaccgggtttgggccagagtagacaagagccttatgcatttgagcagaagcactttagggattatggtttaccagtaaactctaatttcattatagggtcacagttctccacctcctttctttttttcttttctttttttttttttttgagatggagtctggagtctggctctgtcacccaggctggagtgcagtggcatgatctcggctcattgcaccctccccctcccaggtccgagcaattctcctgcctcagcctcccgagtagctgagattataggcatgtgccaccacacccaactaatttttgtatttttagtagagacagattttgactatgttggccaggctggtctcaaactcctgacttcaggtgatccacacatctcggcctcccaaagtgctaggattacaggcgtgagccaccatgcccggtcaagaagtgaaggcttttgaaaagtgattaagtcatgagagttccactcttatgaatagattagtgccttacaaaagagctggacgaaaaaaatcccaaagtgctgggattacaggcgtgagccacagtgccccgcctccacctcctttcttaacagttctctgcctctgtggtacccagcactggcttgagcaatggaaaagagaaagaggggaggggagtgatggctggactttctactttcttcatcatagaaaaactcattctatcccatttttgacattccacttgggagagcaaagtggtgtcaggtagatccaatctgtctactgttatgggtcccagaaagagaagttacaaaaatagagagtgagcaattagaaattttattattttattttatgacagggtcttgccatgttgcccaggatggtcttgaactcttgggcttaagcaacactcctgcttcagcctcccaaagttctgggattataggcatgagccaccatacccagcccagaaatattgttagcaatatgatagaatgagtttatatcttttaaatctaataaaaatatgggctttgattcggcatgtccgttattttatttttctagaaactcacttttattatacgttaccaaagaattcatctttggtatgaaaagaacctgttgtttatcaaatgtggtttgaaaagtactgagggctggacgcagtggtacgtgcctataatctcagctactcaggaggttgaggcaggagaatcgcttgaaacttggaggcagaggttgtaattatgcttgtaatcccagcactttgggaggccgagatgggtggatcgcctaggtcaagagttcgagaccaacctggccaacgtggtgaaaccctgtctctactgaaaatacaaaaattagctgggcctggtggcgtgcacctataatcctggctacttgggaggccgaggcacgagaatcacttgaacctgggaggtggaggttgcagtgagccgagatggtgccaccgcactccagcctgggcgacagagtgagactctgtctcaaaaaagaaaagaaaagaaaagaaaagtactgaagtggaggcttcgattctagctcttacccttgaactgagttccctctttgatcttctattttctcatccatgaaatagggtagagggtattgagatgatgaccaaggaatcttccagctctgatattgtgtgagtctgtgagctgttgagacaggatgggccatccaaccttcaccttggggccacagggaacaactctgtgtcagctgagctggaaatggaaactcgacacccacttggtattgaagaatccgaactctgtccctcatcactatccacactgcccatgccctagtccctgcctcatctttgtatatctaaataaccataacagcctcctaaggggcacccgctccaggacaatctccaaatagtagctgccaaagtcatagttctcaccacataactctgaccacatgccataagacctttcattagctcttcactgtctgggataaagtcctcgcttctgagcagggccatacacagaccttgcgtatcctgacccctgccaaggtcttcattcttccctccactcctcaccatactctagctacacagaactactctcttcttacaaaatactctactgggtctcaactctgtcctttgcacctgctgttccctttgcctggaatacttttccccaccttgttgaactcctacacatcccttagcagcccattcaaatgttcgcttgtcagtgaaatgttctctaacacccatcctcagttccgtcctgctcctttagcaattaaataaaccttttctcagtcttcttcggaatatctccacatgtgtccgtcatccccattagattaaaattttgtctcattcacctctttctttcagctcccagatcccagttgctaacgatacttggcacaagttttaatatgtaatgaatatttaatatttaatgaatatttaatgtattaatgagtaaattcaagctggaaggagaagtagtggcaaatgaatccaaagtagcacagaaataaaaatcaatggatttgattttaggaacataacatggcttttaagggcacgttatatgcctgtttgcctgaacactaatctttccaatttgcataatgcttttccatttttaaagcatttatacataaatgacttcattggatattcacagcaaccctgcaaggtaagtaattttattttcatttttaaatggctcagagggtcagagaggcaaaacaacgtacccaggggcgtccagctcatgtgtgggacagttaagccttgaaaccttgacctcagatattctcacaccctatcagctgatgcatactgaaggcatgagagctgctggaggaggaggccggcagaaagggtgctgggaatcgggcgctggcaagtgtcccttttcccctgtatctatctgtcctttcaacctttccttatttatttctcctggctgctttgtagaactgagtccaggaacacctgccttgttcagtgaagccgctgcccatctaaagaagctggaactggaaactgtgaaggctgctggaccctggcctcctctgcacatcaacataaacaaggtgccaagggccggggctctgccatgaccatggacttggtgctgacatcaaacctctgattactaccctagcctgcctgctaaaccaagtgcctttgccttggagggatctctattccatctttcctgacatttctgttcaggctgtcttttaggagcaaatatttacttaccttccttttgggtgaattatagcattaggcgtcgttcccagtgttttgcctgacaggctagatctgtttgttagttgtctctccctcctactagaccgaaagctccagagggagcatccacatttaccgctttgcatttctagccctctatctccctctgacaatgcctggcacattgtagatgttcagtaaccatttgcagatggaaggaagggagggattaagatacagaaggagaaggagacagggcagaagccaggcccccttttgactagacctattcttacatccaaagaggcagccttataaaagtcaaattttatcttagaacgatacataccactgctggattcagtctgccatttagttcaaccttctcaatgtctcagaccagaggaagggaaatgactttctcaaggttgcacagcccttgacaaccttctcaatgtctcagaccagaagaagagaaatgactttctcaaggtcacacggcccttcacaaggttgcaaagcccttgactctcgatccagtgtccttggcactccaacatgcttcctcgttttctttgccagcgtttctcaactttggcactagcaacattttggcctgatgactcttttttgcagtggctgtcctgtgcattgtaaaatgttttgcagccacaatgcactaaatgccactagggacccccatccagttgtgacaaccaaaaatgtctccagacattgccaaatgttctcagaagggcaaaatctccctagttgagaaccactgttgtacatacattttaattttttaaatcccctaaggaagaatctttttcattcatggttcctttcttcctctttaatgcttagctttgtccctttatgagagggaataggaagaatttggaagaactgctctgtgcagcatgggaaggttacacctcctgcccttcccgtccctgacctttcccataatccctcagcagggcggcctaaagttcctctgattactaatggaccccaactgcaggtttaaccttcaaaaagccctgctcattcactttttttttctatacctccctccatgattgccagctagagagaattcctcctgcaggatggctctgatagccattcaatcaacagatctttattgagcaggcttgccctagctgctagggattcaacccaatgcaccgtgtgccccctgattggtcttctttttcttagtcgcctggttttcaacttttcttctgcagtgtacacaataaatggttttaatgggggcttatccagactttggcaaaatccaaaaatattttgcaaggaaatacagcatatagtgtagcacagaactcacaagctctatagtgatttgcaattgccatgactattggtggagcgttgacaacagcagtttgctctgggtgaaggcctacctgagacacctgtgggttatcgagcatttccctggaggtcaagttacaactcccttcctatctcctccactcaaagaaattggcctggcatggtggttcatgcctgtaatcccagcactttgggaggctaaggcgggtggatctcttgaggtcaggagttcaagaccagcctgggcaacatggcgagaccccccccatctctactataagtacaaaaattagcaagttgtggtggcgggcacctgtaatcccagctactagggaggctgaggcagaagaatcgcttgaacccacgagacagaggttgcagtgagctgagatcctgccactgcactgcagcctaggtgacagagcgagactccctctcaaaaaaaaaaaaaaagaaaagaaatacattagtaatcaagtaagctagagtgatgtgattatacagataattttgactttgtcccgacacacacacacacaaaatatattacttcacactttgatttttttttttttttgagatggcgtctcactctgtctcccaggctggagtgcagtggcatgatctcggctcactgcaacctccacctcccgggttcaagcaattcctctgcctcagcctcccaagtagctgagattacaggcacgcaccaccacacctggctaatttttatatttttagtagacatgggatttcaccatgttggtcaggctggtcttgaactcctggcctcaagtgatccacactccgcagcctcccaaatggctgggattacaggcatgagccaccatgcctggccacactttaatttgttgttgttgttgttgttgttatcatccatgaaacattccttgcaacagatctcccttctcacttctgatcatgacaccaaaattgggagccactggcttggatggcttttaaggttttttccagcctcaaggatcaagaatcctctgattcttctaaggtttggataactttcgcttcttgattgaatggtgagatgtcattttcactgtccagttccaaagtttgtgcccaaaattaacacaagaatttaattctcatcagattttagatgtgtaaacaatttgtataaacaattcaaatatacatctgatcatttctttatccccaaatgatatccccaaacagacggactatttccaactataataatatcaaagcctaattgtcattcatgtctatgttttgaaatctgtaatcccatattgaacaacaaagtatctttccacaattcaaattgactgaacataaaatacaaaatacagtcacaggaaaggagaaagcacaacattcttgaagccatcctccaggaaggaatgatacggtcttggaacccagatgcttatctgccacagagatatcttttatacaaattcatatgacgacgcacaaatttcccaaaatgtatattggccttcacctgcgtcagttcatatagcagaatattacaggtcttgcattgtccagaatgaacaagaacaagccagcttgaattttatgtccaaaaaagcagtttagaattagtaaattcaaggggaaaatcagtgctaacttttcgttcttattttagcagcattctattttttgaagtgggtcttcggtcattactgccagtataactacttccccttaagcaattgtcaaaagcctcaaatgggctttataaccaatttgactcctgtatgccagtataccattctgaaaaattaaatctaattttaaaactatctcttcatgcaccagtgaaatatccattcaattatcttgatgtaacaggatttacaaacacaagataaattatcttaagggtatactgtaaacctcacctttcaaaataaatgttacttatttgcctgaaggagaatgtggaggccctcaggataatgaatccagtcaaatgagccagctttcttcagattcagcttgatggctcaggaacgattgatagctcaggatcgatcattagtgttctcacatccaatgctcttttttttttggttatatatatttgctaactaaagaatctaacctgaaagtgccatttatatctgtttttctcacttgagcaccataacaatcctatgaagaaagaaacagattcagagaattgaaggggaagcagtacgattgactagtcaggagctctggctttggagtaaccaacatcaccatttctggctgtcaatcttggctcctctgcttacttcctgtgtgactatggacaagtgacttaccatctatctgctttgttttttgtatctataaactggggataatgatagtagttatcttgaaatgagatggttgcatgaggggacttggtgagacatgcgtatgaaatgcatagtcagtggctaacccataataagctctcagtatatgttagccactggcactctttttctttttataaacagcatcttttttttttttttgagacagggttttgctctgttgcccatgctggagtgcagtggtgcagtcttggctcactgcaacctccacccctgagctcaggtgattctcccgagtagctggaattataggtgagggccaccacgccctcttaatttttctatttttagtagagatggggtttcgctgtgtttcccaggctggtctccaactcctgggctcaagtgatccacccgccccggcctcccaaagcgctgggattacaagtgtgagccaccgtgcccagcccatgatcctttttttttttaatggtccaagtaagtgaaagagctgagattcaaatctgtctctgccgtcttgctattacataaaattggaaagttctgcttggtctaccaaatgcttctccatatgtttggaggtccccctgggaaactctacctcatttctttattaaacgatattagctggccagttgctctatacttcctctagctttcatagcacttagtgtgtaccaacatgctcagtaggacttcttaattagtgaataagattaatgttggaacttgaagaacttgagagctttgggacatttgattcttgctctggtgcatggtggctgatatgtcacatttagtcctaatattactgaactgacctctagcaatcacacggtcctgtcttccttattaaacacgtctcttctaataatgactgtatattatcataatcttctttagtaggtatttattggacatctactatgtgccgggtaccatattagcattgggatatgaaatgaccacaataggcatggttaacaataagacattatttcccaaaatgtagtgtgtataccatcaaaggtgatttcaggttgtacacatggatgagtactttttattttaatagtgatttaaatatcatcatgtttattataataaatataatagtcacaaagcctataatttcaaagatattattgctttggacacagttcaaataggtggtcccagggtaattcaccttaactggatcacatgaattatagatacatgttcagtgaatacatgagatatggcaaaaattataaaggtcatgcaaattactgaagtacaagacactctacaataagctaacaaatataaatttcttgttgaaaatcacaattttctgcaagatttgttgtcaaactaccaatgaatattttgtacccttcccctggacccaacaagtcacagaattgaatttttctatgtaagagatggcagttatggggaaaataacactggactgaggttaggagacttgaaccaggagatgtcctcttctgccactggctcttgccccatgatgctggaaaagccttttcttctctttaaacctttaccctggcttctggtaggtcctcaccctatttcacgagggaatgacatgctgtgcctgagaaccctttgcaaatagtaaagcacagataaaaatataaggagttggtgacacccctgtctatgtatgtaggtctgtgttatatgcagttatgattattgggaaaagttaatgcacatggttctctctttgtttacaatctgctgtttgtattttggtttgtctcaggctgaagaaaagaaagtctcggagaaaactcttcagactccacttttgccttcccctgttgcggatcatgtgaagtgtaacattctgaaagcccagttggaaaatgcttcccgagtgaacatccaggtgcgcagaatgcatacattcctttgatttcatgttataggatttcctcgatgccacagagaagaaagaggcaccgtaggactgagatgctgtgtcagtcagggtccagtcaggagatgagaaccgggcatgtgaaccatacctgatatgtgaaccatgattttaatttaaaaggattaggtacatgaaagggtgaaaagagaacttgaaggcagcagttctcaaatgttattgtgcataagtcacctggaaaactgggccctgtccccagagatttggtaaattggggtgggggctcatgaatattcctctcctctcctctcctttctctctctctttctttttctttctttctttcttgtctcactctgttgcaaaggctgggctgcagtggtgggatcatggctcactgcagcctcaacctcacagcctcaatcaatcctcctgcctcagcctcccgagtagctgggactacaggcatgcaccatcacacctggctaatttttgtattttttttatagagacagggttttcctatcttggccaggctggtctcgaactcctggactcaagcaatcctcgcgcctcagcctcctaaagtactgggattacaggcatgagccattgtgccagcctgaatatgcatttctaacaagcccacaggaccacattttgggccacacaactctaaggtaccagaggtagcaactgcaggccacactttccatccctatagctgagggaacagagatgctgtcaacattaaaatttagatatttggaggagaagccctgtggagactaaactcagacttctaagcaggggccactgtgcctggcgctggcatttctgagctcttaagacatgcctgtgggtcctggactcagactgaggaggggacatcagctggctggtgctgatatgtctgaggtggataccatgcagctggatctgccagtgttggaaaactgcaaattgtattcagctgtgactgcaggaggacctgctgctgcccacaagaagcagcaaggctggggtgactcgcaggagcaggaagcagacaaggagcgccccatgtggacagaacctatcatggagccacctggcaaagcagacatgaggtttgcaggcccctgggccagctccataaaatagatgtttgaaaggtggacttggagataaaagttgctagtttaatagctgccataaattctcccacttgaactcataacaggtatccctggtggaccatgactctttccctgtgaccctaaatgcagcctcagaatcactttctacatggtgggcattccaaggaggtaccacctgttgatcagagttggcactcaggtggaagcccacttgtcatccttgtcctggaaatattataaaaagctgcagtccgtgatttcattagaaaaatatataactatcttcttcaccctgggcacagtggctcatgcctgtagcctcagcacattggaaggccaaggcgggtggatcacttgaggccaggagtttgagagtagcctggtcaacatggcgaaaccctgtctctactaaaaatatgaaacttagccaggtgtggtggtgcatgcctataatcctactactcgggaggctgaggcaggagaattgtttgaacccaggaggcagaggctacagtgagcagagattgctccactgcactgtagcctgggcaacacagcgagactccgtctcacaaaaaataaacaaataaataattaaataaagtaaaaaataagaaataaattttaaaaactatctccttcattccttataaacctaatgtatatgcttatgttgccaagggtaaagtaaatactcagtaatctcttctattattatttccatttatatatgtagcaatctgaataatttaggtccttccagaacataccatgaaagtcaagagaaagcttacaaaatgtcttttatttgggggttgtgatataaacaggaggcagtaagatgtagaacacaagtttcaaagtcagatggtctggctttgaaccttgatctgtgattgatcaggaatgtcaccttaagcttgtttgtcaacctctctgagccttagttctctcctatgaaaatggagataacaacatctgtcaggttattgtgaagattacatgagattatctatgcagagtacctggtgcaatgccttgctccaccactgcagaggtattgacaacagtggtcacagttgtggcgtgatgaaattgctgggggcactgattgcttacagataacagtagtagccctttttagaggatggtcaggtttatttcccatcacaaactcaggaatgtcaaggttatagtcacaaattctttattttcagtctaccttcattgatttcaggtatgccatttttatactatcacagaacaaacaaaactgacacatattttgcaatttacaaagctgtaattatctacattagaaagttgtaacatgttcccaataaccccatgctgcaggtattatctgtggaggacccatatttctgctccattggagaagtgcagtatcttgaaaatattctattttgtaaagtatagggaagagatgacaaataggtaagaacacatttcctagccaaaaggacacagtggaagggcatgaaagcaggaaaaaagcaggggagtgtgaagtcagtaatttgacattagcgtttcccaagatgttataaggaacacaagccccacaggattctccctgataattctggaaatgctgcacatgaaatcccatgggacagtcccagtacacatcagcttcttatagtctctgaaaagtcctgcaggaaagaagcctgttttactttctttcacacctaactggccataagtagctcctactgttatctgtagaactgaaattcataggaacacagaagcatgctttgggaatccatggtttagagggttttgaggggttgtgatggagggagaggaggttgatgcacagccaagtatactgctaggggtttaaatgttaatcccctattggcatcagtgcatagtgagagtataaggaaaggaagcagaagtcaaacagaccaatggtactatctgttgctaactctaaaaaaggctttggctgggtgtggtggctcatgcctgtaatcccagaattttgggaggccaaggtgggcagatcgcttgagcccaggagttcaagaccagcctgggcaacatggcaaaacctcgtctctacaaaaaaaatatgaaacaaattagctgcgtgttgtggtttgagcctgtagtcccagctaatctggaggttgaggcaggaggattgattgagcccaggaagtcaaggccgcagtgagccatgatcgtgctgctgcactccagcctgggcaacagaacagaccctctctcaagaaataaagaaatcaaaaacaaaaattaaaaaggctttgattaggatgtaagactggatctatatgtgggcaatcttgacaggctaataatgccatgtcctccaagccagcaggcttgaaatctttgctcaatatgtatttagaacagaggccaagctctgtatgttgtgatggtcgtgagggctgcaggcctctgcatgttctattgaccactagtgtgtggtcagctggcctggctggctgagtgggtgtctcttcttcccccactattctttgtgggactcatcagagggaggaggacaaggtttctctcaaaatcatatgacgtgattcctgccaggctgttatggttgttatgctgatgtgaaaggacagattccaaattcctttgtaaactgtaagtgctatgtgaacatagagctgattattattcctgacccaaactgtgaggtgaaggattaaactgcgggtttggcttttcccacactatccctttctaattcaagcatgagctggcacgtagcaggtgttcaataaaagcatgaatgcaagaattgattgcatctgaatgattgtcttaatcctattactcaagaaaacattttttgttaacatatataaacaccagtgcaagattctctattgattgagtacttggtgaactacctctttggtccacttgccaatttctataatcttttgaatgtaagagacttgaaaacattttttgcatgccaacatattcagttttgactaacctgaatgctttctttaacagggtggaaaggaggaatcaccgtttgtaaatatcaataagaaatccagtcttcaggacgctagtgtaaggtctgttgctccttgtctgaatggggaaatgatattctctgtatcatcaacattatccttgaaacattgctcacgagggcattagctgataaaatcagaggacaaataaaacagagaataggagcccaaagagatggaaaaagactggcttaactaactttccgcaagcctcaaaaatgttgcttattctcagttttaatatctctgcctgctgcattaacaaagaaatcaatcacttggggttgtcactcaagcaagtgggcttcacattgccatccccctgcttaaagccctttaaaggctctgtttacactcagaatggaatcccaactccttaacagagtgcaggaggccaggcccttcaagacctggcctctgctcacaactccagcttggacttgggccagcttcccttggcccattgatgtgccctgcctgctgagcttcttgttagtgctggagccacatatgttccttttaaaaatgtatttatttaattattattttttaagacagagtcttcctctgttgcccaggctggagtgcagtggtgcgatctcggctcactgcaacatctgcctcccagattcaagcaattcttgtgcctcagcctcctgagtaactgggattacaggtgcacgccactgtgccagctaatttttgtaattgtagtagagacagggcttcactatgttggccaggctggtcttgaactcctgacttaagtgatccacccaccccggcctcccaaagtgctgagattacaggtgtgagccaccacacctagcctactttttctttgtataaatttatggggtacaagtgtaacttggatctgtgcatagattgcacggtagtgaagtcagggcttttagaatatccatcactcaaataatgtacattgtgcccattaagtaatttctcatcatccactctcctcccatcccctacacatgttctttaaagcttccaggccaccaccaccccaaacccagaggaagtccttcctcccctgatctcacagagaacaggaactctttccttcttggcatggtggtggtggcctcattgccacctggtggtttactaacaccagcagggtctccttagggtagtttcccaaaatgggtccaaggaccactgcatcagagtctcttcttaaaaacacaaactcctgggtcctactccagaccttttggatcctttgtgtgaatgtgtgtggtgggtgtttggtgggtgccagtagagacaagaatcatcatgttagcgggcacctaggtgatctagaaccactgctctggggaactattatactcgatgccaaaaatcaaagctaacatttctctgtatcaccttatgattcccaatctgtgtgcttggtataaatttgtcttactcctgagatacatacccagctgcctccagggcttttcaaaaacttaattcatctcttcccactccaccccactaaccttcacctggattccattcttagtcaatggtattattacctacccctcacccaggcctgaaacctgggagtccttgcttttctcctaccttattccctcatctaattggtcaccaagtcctggcaatttgactttcattttaccttccacatccatcctcttttcctcttgtctataccttgagccctcattgtcttccgggcctactgctgcccacagtcctctaagatgcttctgtcctccctttcacctggtcctcttcattgttctaaggacctttctgtaatgtaaatctgactatgccactcctttgcctaaaacctttagagagttgaggtccattgccttcagtgtagactcctcagcctgaggccccatatgacccggcctcgactttccctccagttaaaaccctctgctcttccactgagacctcaccggatggtagttctagtgccctgcgttcagccaggtctccactctgcctctcatctttgtggtcttcgctccatctggaaagaggaaactcctccacgtagctttccccgatgctgaccgttccacccaagcaaattcatgtgctccctcaatagactatacgttcttcagggaccatgttccctttactgtggagtcgcagcttgaggaaaccatgagtatagaatgcattgactcaaatcctctattttctcattcatgtgtttattcaacatactttttttttcttttttttttttttttgagacagggtctcactccagcacccaggctgcagtggagtagcataatcattgctcattgcagcctcgacctcctgggctcaggtgatcctcccacctcagcctcttgagtagctgggactacaaacatgcgccaccatacctggctaattttgtatttttttgtagaaacgggtattatcatgttgcccaggctggtctcaaactcctgacctcaagtcatctgcccacctcagcctcctaaagtgctgggattacaggcgtgagccactgcacccggcctcaacatgcatttgttaggccccggccacatacttatcaccatattgagcactgacccaaaagtgtcagttgacttgccaggtgtccctttcaaggacctcaacttgttttgatgccttgttggtcctaggaggtaatgaactgattttttaaaaatgaaattagtcatgaccactacaaaaatgcattaaaaattttccttaaaattactattttgagtagggtccattggttacctgaaataaattcttgagtaaagataaaagtgacgcttaatttttagcattttcacacatacatggaattaaaatgtgttacagcaagtcctaaaggtcttctgattatgcatttttcacacaaagtatagtatggttcttatctttttttaaaaaaaaaatatagtctgtgctatgtttaaaatagaatagctaccagattacttggaattaaaaacaggttatccataggtttctcttcattttactggcaaaacctggttatgagccaaaccctcattctggttcacccctcatattggggggcaggggtggctgttacggagcagagaaattttattttgtacctcaattatgtttagttgccccatttgctatattttcttccctatgatttttttcttactgtttggattttctatggttttaaaatataattataattatgaactaagtacggtagaaaggcaaaaaaaatggatttcttgactatcaatgttattaaggtgtacattaactgagaaagcagtccctatggctaaaacgagaccataaaccttttttgatggtattgttctgtttttcggtgtgtctctagaagtcctattcctattcgtgtggaaactgcccagccagctgtggaaaagccggaaatcaagcctccccgagtgaggaagttaacaagacagtatagtttgtgagttctgtactgcaactttttcaattaaaacaactatgatgactaattgtttagatacaaatgcttcttagcccttctgactagtcccagggagcagcccccaaattccatttatttccaatttaggtaataatgagactagccctttctccctgaaaaccttacatagttagcataaggattcattattgactactgtgtaataaattactcccaaacttagtgtcttagaacaatccacctttatcacctcacagttcctgtggagtgggggtcggggcatggcttagctgggtcttctgtatccggggctcttacaaggctgcattcaaggtgtcagggctgcggtctcatctgcaggcttgtttttacggttgctgacagggatcaggtcctcaaggactcttggacagaggatgccctcagcctgtagtcacataggtctctccagccttctccatcagagaaagcacataagaagagccagagagagtgacagcaaggcaaaggcacagtcttttgtaacctacgcacagaactgacatcccatcactttttttctttttgagacaaagtcttgctctgtcgctcaggctggagtgcagtggtgtgatcttggctcactgcaatccgcctcccaggttcaagcaattcccctgcctcagcctcccaagtagttgggattacaggtataagccaataagcctggctgatttttgtatttttggtagagacggggtttcaccatgttggccaggctggtctagaactcctgacctcaagtaatctgcctgcctcgacctcccaaagtgctgggactgcaggtgtgagccaccgcacctggcccccatcacttttgccatattctgttcatgagaagcaaatccctatgtccagcccacactcaaggggagagattacacaggggcatgaatactaggacggggatcattgcaacccacatcagaagctgctttccacggcatatccatgaaaaggcagccccgtctgtcaacagaaccaaagctaatcactgagctttgacacctgtaggaggagccatttcccaaaatgtcccagaatcaccagggcacatgtgcacctgactgttctaggcatcgttagggaatagtaaagtgactttgacaattcccatccaaagactcacactttactggagggaaagacaagagtcacaaataattataatccaaagcagaaagataattgctgtaatcagggtggtgagtactagtaatagttgtagtactgatcacaatggtatttccctttttttttttttttttgagacagagccttgctctgtcactctgtcactctgtcacccaggctggagtgcagtggcacaatcttagctcactgcaatctccacctcccggattcaagcaattctcctgtctcagcctcccaagtagttgggattacaggtgcccgccaccacacccagctaatttttttgtatttttagtagagacagggtttcaccatgttggccaggctggtttcgaactcctgacctcaagtgatccaccccaccttggcctcccaaagtgctaggattacaggcatgagccaccgtgcccggcttgtagttcccatttcttgaccttagctatggcatgggtactgtgcccagatgtgtcattggtcagagagtaactgcagggggatctctggacgaatgaaaaggatgggggctttggagttggaaaggcttctgtcaggcccctggctagtttacagctgtaagctcttggaaaagtgactgtttgatcctctcttccttcctctgtaaaatggatgagataatacctgcctctgaggagttttgtggggcttaacatgagagaatgtgggtaaagccccaataccctggccataggatgaggtcccctttctttcttctctaggacctggaagcttctgaggaaagatggagtttagggggtacccagagtgcaaaatgtaggacaggacacgggattctggatgcaattctctaacagccatctcaggtctgccatttgtacctgtgaaaaggaaaagaggcatgtatgggggatattaagggagatatatcccacctcatatccttcatagaaacttctggtcagctgcatttcctaggaaagccaaaacgagtaaagttcaaataattaacagtcctaatgatctctgggggacaattaagccatgacagtttgcttccctcgaggataagactggcagaacttgccattccttttacattttgaaactcaaaatgttactatcactcatttgagagatgtaatcatgtttgaaacaatgactggctgatatataacctggaaggaaaggaaatttcactaactcaccaaactcactcttttttttgtttttttttttttttgatacagagtctcactctgtcgcccaggctggagtgcagtggcacaatctcggctcactgcaaccttcgcctcctgggttcaagcgattctccggcctcagcctcccaagtagctgggactacaggcacatgacaccatgcccggctaatcaaactggctcttttaaggacactctttttcaaaccttgaactttacatgtgtatttcttaagctgccccaaagtattctgctttgaaaatcaaacaatagcagcattttccccattagtagaaaatagcaacatccatggatgagattttcccagtgttattgtcccataaagagttctcgaatccttgacgctggctaccgctcatttgcccatctttttattattattattattttatttttttgaggtggagtctcactctgtcacccaggctggagtgcaatggctcagtcttagctcactgcagcctccgccccctaggttcaagtgattctcctgcctcagcctgccgagtagctgggattacaggcgtgtgccaccacgcccagctaatttttgtgtttttagtagagacagggtttccccatgttggccaggttggtctcgaactcctgacctcaggtgatccgcccgcttcagcctcccaaagtgctgggattacaggcatgagccaccacacctggcctttgcccatctctttaactctttgatattgataaagttggcacgtgatcaaggaatataaatgggaaaactcagatctctgattttctggaaaatattttttacatcatcatttttgagatacagatttgtgtgcacacatcgcccttttggctgttgtaatatttctagttcctaggctggaataaggtgtagtcagattttaggttgctccaccaaaagcattgtaacattcaggtgctgtgaacaagtcttcaaaccactgcttttaaagatacagacaaaaatctcagccacattatttcctggaaatatgacaaggagggaaaatgtggctgctacatgcagtgagaatggagaagtagagggtctctacagagagtttaaggcaggcgaaaaggtcttttttttttttttttttttcggagacaaggcctcactctgttgcccaagctggagtgcagtggtcgatcacagcccactgcagcctcaggtgattcagctcaggtgatcctcccacctcagccttctgagaagctgagactacaggtgtgtgccaccacatctggctaatttttgtattttttgtagagacaagaccagaccatgttgcccaggctggtctcggactcctgtgctcaagcaatcgcctgccttggccccccagagtgccgggattacaggcattagcctctgtgcccagccaaaagtgtcattttttattgataccagctagtatgtttagaaaatcatgagctattttatttttttccagaaatataacttcactgtttatttaaacatagtgtaaaagtctaaaaaaaattcaatagtgctcactttggcatcacatatactaaaattggactcatacagagaagattagcatggtccccctgcgcaaggtggacatgcaaatttgtgaagcgtttcatattttaaatttttaattaaataataaaatatttataagttaattaaaatatttaaagaaaagaaaaaaaagtaaataggcaagacagaagagaaaagtagccaatttcccagaatcaaaaataaccagggttcatagttgacgactgttacattagacaagtttctatgcttatatattgttaaaatagaaacaacttcaaagcaaaaaatcattctgtatgtaaaattttacttatgaaactgttgttttatgactttatcatgaatttaccttagaaacaggtaaaattggaagacttgctgaattttagatatgcttcttggccataagatctaaactaagacaaaagataaaaaccatgatgaatttggagtctttttcaattttaggcagtgtcagttgactcccttctgtgaaaaatgagctatggtttttaaatggccttttatataaaactaaataataataactatgctattgaggtgataattttttaaatgaggtaaaaagaaattttaaccccgctcctccacttaactagctttgcgaacttgaacaaataatttcacaatcagctgctaaatatcatctgattctctgaaaaatggagatggtaatagggtcggtgtgaaaattaagtgggtgaatgaacgtgtaacccatctgacctatgtcatctatgtggatccaaatacttggtgtattattaatttttccatgtacttattcaattctcacctttccccctttttagtaatgagccctaagtccttcccttgaggcttctccatacacagaataatctaaaacctctcagggacccctcagtcaatcccatccgcactgcagctttgtctcacggcctcatgttcccacgtggccccgtgctgggctgaggccttaccagtgatctgcacaggctgcactggtgcctacctgtcatgggtcttgtatctacactcttgagctcagccatcattctaaatcacaacccctatgcaagggtggctccagaagctctacatggcagatccttagggacaatgtgcctggagtccccagcaccacccttaaagcagagagtcagacagatgtttgtacacccatgttcatggcagcatgatttataatagccaaaagagtgggaacaagccaagtgtccatcaacagatgaatggataaacagaatgtggtatatccatataatggaatttttatattataaaaataaatgaaattttgatgtatgctacaatgtggatggaccttaaaaatattatggtgactaaaataagccagacacagaggaacatagagtgtgtgattccacttatgtgacgttcctagaataggcaaattcattgggacagaaagtggaattgatgttaccagaggctgcagggaggggcttggggagttatcgttcaatatcaatacagagtttctgttgtcactgatgaaaaagttttggggacagatagtggcaatggttgcacaatattgtgaatgcatttaatgccactgaattgtatatttataagcagttaaaatgataaatattatattgtatatattttaccaacaaaacaaaacaacaccctggcaaatgacagaaaattcaccccaatttgttttggcaaaaaagtcagagtattggatcctgcaagctggacatctggtggacatctgtttgggaacccccaatccccatccctggtcttcccacccctgcccatcctccgtccactcctcacagcctgtttattattgtaatgagcagagcttcatgtgcttttagtaaccgcagtgatgaagacgacctccctccagacctggccgaggcagtgggagtgaccacatctacaaccacaaacaccacaacggccgccacacaagtctccgtgccgctgccgtcccccaaggtccagaatgtcagctcgcctcacaagtcagaaggcaaaggcctgctgtcccctggggccaaggtattggggggtggaaagccctggcgagcagccacacttgctgggaattcagtatcaatttactgagtagcatctggtgcatgtatttaaattttgcataatcaattgtgtatactcataaaacaacagcaacaaccagaacatgtttttatataacttgaccccaaaatacaagccaaccatttgtgagacaatgagtgaaatataaaatcaggttcattgtactttaattgcaatgtaagagatttttgagggcagttttcatttagaatctcatctctataataagctattagtccactgtaaagatagaaagagagaaatgattcccccccaaccatagtgaacagtttggaggagcaaaaacatagaagtgtccccatcccttcccttatgtcatatagccggtgttagtagtttgaaaataggaaatattattccatttgctggtttgaaatttcaggaaattgcctgagatgtgaatgggctatgacaaaggctttacacaagatgtttctcttggttttctttgagagacctctagctacgattactctttggcaattggtccaaatacaattgaacctattgctgtccaagtggattcaagtcagaggttgcagtggttcatgtgactacacagagaaaaggtgcgtgcaggaggcaggtgccctgaaggcaagaccggagcttcagaggctgttcccagctcttccattcataagccacagcactcacttccaaaacctttatttcttcgagcctcaatttcttcctcttaaaaatgggaataagatctgctatcttgccctggctggcgtcaggttcagtggaggttaaagtgctcatgcaaactggatgcctgaggcttttgcagcttcagggatcacaattcctggtgacagctgaagaataatggtccagggccacctcctgcattaccaaggccagtctttcacctggtgccttccctgggtgtctctggaaatatctctgcttagtgttctgcacagaaacctgcctggagtgctcagccagcgactggccaagatcgaggttctctgcttctctatagatcacctccacctattggcatctcagcctggattatcctccactgtgtggagccccctgtacaactttgtctcaggtgtggacccaggctcctatcacatatcccacactgtggttaaaaccaggctgaacgaaacatttacgaaacagaagggggttggggtggcgtggaggggatgcaagtggcatcccaccaaaggccacagggctccctctcctggccatctctctccttggggccttgcttgaaccacgttgatgggacttcttttttctcccttaaaagacctcgaggccatccatgcagctaagaccccagagcaggagggcaaaacattttccaaaagcaagcaacataatccacatgccatcacctgccatgaagatcattgctcttagtgtgcagatcagtttagctcctggaggaccctggatttgatcctcttaatctaggacaaggtctttgctctctctttatacattcagaggactctttcaagtgttttttccccaaaagaccagtagaaaagcactaagagcacttaagaaaagcggcccgcagctctgaaagggacagctctctgcaccatgcctacttctacctatgaaaaaattggggttcaagtctcaacattttgtacactacttggtgagggaaatacaaggggattgtcattgctaatgagatcagtgtagaggagaggctgggaacctctgcctgtcttttctggtgaactttatcatcaatgcagtgccgtctctaaccaggggtgtttgtctgtctccctagagcccctctgaccgaggaggtgcctttaccctggagccgggtgatcttctgatggatttcacagaagccactcctctggtaaacttcctattttgctaaaaccagaaaagtcacagaccatagaaacatcttggcagtgggacggatggacagaggtgggcattgctgttgaggagcctcttcctcttgtcctggaggctcagggatcagctttcatccaggggtcaggcactgtgggtccctccacctctagagcccttgagggaggaaggggtgctcctttgctccgagggtagttgtgggggtcctgcccatgcctgtctactgcacttcgagtgttatagggctcctcggtgttttgttctcggcttcttggcttcctggactgcgccctgcatgcccacccgtggggaatctcttgctgttgcttccgacgatccatctggtctgaagcactggctcaaggccacaccccagctttccaggcccctcgcacctcctgccatcttccatcctctgcatacaggtctccccttagggatggcagcccttgtgggactcctgcaggtgagaaacccttttcagggaacaagtaaagggcctggtgggtctgagaattagggtcaatttccaaaaaaaaaacatggtggctttgacaagagtgatgagattcccttagagatcattgtgttgcaggtccagcttgtagatttaattacttatagatttaaatggtcttttctttgtttgaactgaacaggctgagatgagaaaggaagcagcatctggtagggaattggagatgccgtgatctgaggggcaatgcctgccaaatgactgtccagcctctgcttgcaccccttcagtaataggaagctcattctctctccccaagacacgctgctcacatctcagggtatctccaactaagctatgaaatgggtatgggcctgtttcactgctcaggcatgggacaactgaggtccttgcactgcactgagacacagccaccacttcacagctgaagtttgcagtgaatgtgtgtcctcaggataaagcatcctttgaggcatgagtgcatgtatgcaggcctcagggagaaggtatcctgggcatctagctttttggcaagagcttcctccattttgggctttccttggtaccatgggccttgacctcactttgttccagaatcctatttccatgagcgccaaagggtcctagaagggaagaggggactccagccatctgcttctccctttggtcctcctccctccatctgcttcccccagcatcagaaatgcaagcagcagccctcctacctgttggtagggtgatggacaggtctctatctcaggggaccaggcctgcctccgcaagtcagtgtcctggatgctgctgatgagggctgcagaggggcttccttatccatgggaggaaggagccagaagtagagggaggcaagggtgacccccgtgcctgacttgtgaccagggcttcctcaactaactggccccagcctatcaggtggaacaatgccttgggaccatctcatccagtccttcacatatagatgggaaaaccaaggcccagacaggggcagacacttgtcccaagtcacatagcaagtgtgtatcaaagccagttctagaacctagactctgggctgccattccagtggcagatggcccaatccaggatgtgtctgtgtctttccctgttagccagtaccctccctcaaagcgggtcagatgccctggtctcagtctgggctgtgggacagccctgggaccatctccaagctgtcagcccaggtttggtcctcagagttgctgagtggagcatgaggaagggaagtgctcaggtaccttggtctaggagactcagcctggatgagctatggttattttgccaccagccctgtgccctttgcctgtggctgctctctctgggccttcccatcagcatttcctgctgaagaggaagcagccctttacgggcatgaatgtcagaacttcccatgtgctactcatcacacaggcagtgaattacccctccttggtgaatactttttccatgtagtcatttcccaagcttacagcctatctctagccccctgcctcctactggatgagactcctgaggccccaccactatcctggtccctaggcccagtgctggaccaacagggaactggagatcttgccttcattcagcaacgttccaccaagacactatcagaaccagcgtaacctagccgagcgtggtagtatgtgcctgtaatcccagctacacagaaggctaaggcaagagaatcatttgaacccaggaggcggaggttgcagtgagccagggtcacgccactgcattccagcctgggcaacaaagcgagagtccatctcaaaagaaaagaaaagaaaagaaaaagctgggcatggtggtattattcctgtaatcccagcactctggaaggccaaggcgggtggatcacctgaggtcaggagttcaagaccagcctggccaacatggtgaaaccccatctctgctaataatacaaaaattagctgggcatggtggcacacatctgtagtcccagctacttgggaggctgaggcaggagaatcgcttgacccccagaggcagaggttgcagtgagccgagatcgcgccattgcattccagcctgggcaacaagagtgaaactccgtctccaaaaaaaataaataaataaaaagaaaaagaactagcataagcctttcacttttatcactcttgatacttgtggccggtctctgtgtagagtggttttcaaagaagcacagtccaaagagcccagattaataaaaagtttcaatctggaacaggcatctctcaaaaaatcattaaagaatattacattaacacctcctgtaacacatcttgatctctttttgccttttcttttattctcttacattcctgcttgactccagggactttcattcccaaactctccacaaagaaacactctttccaacttcgcttttgtaggtttcttccccctccttttcccaaaccttttcctctctaatccccaactcttttattaggtagctcaatttagcaatcttaagctttagaacttttgcagcttcacgtctttccatttccgattctgtatcagagttcgtaatcagatctgaatttctgcctgggttgcaagaggtggaatacgtgggtgagaagggaaggaggcaagtgagtcaagacagcacctgctctccagttggtattttctttaggatgtgaatgtgagcaggtgcttgggggcattggcgttgactgagcgaggggagttgggggagggtacattgatgcattagtgatgttcaccctagaatgcggagtcctgcacgctactccaagtctaccgtgctagcttccctccccaggtaacacagaccatgaatacctgtgctttctgtgttctttacgctttctctttggggctcgtccctctctgatccccatgcttcatgaaccacttacccaactgcaaagcagagccaattaacacccagatcccttctgggccatgacatgttagtcaaaagttcatgtgtctggaaggacagggccctggccagaggaaggctgtgtagggcattggaacaggccctgggttaggtgttagaagggagtttccatctggtgcaataacttacttttattttgaacttaattataccagcagggctgaagctgaatctcaaattaaattagggtaccccttctgtgattttggctgtgttccctagggcacagggaggtggagagaaatctatttagtccatgatgtcatctgttcactgatacatctaggcctctctttggttctttcgtggctgttttgggtgggtggagatcactctcctgccaggatgtgtgactctctacctgttggacaacattctgtttggaggccaccctgtcctggggcctgccatctcctcagctctacctgagggggttggcagggctggttcttgctgctcttcagtccctgcttcccagcctcagtgtctggagaaagttgcacagggcccctttgctcggtactcactaaagtctactcctcctccctttccctctgacttttctctccaatggtcaaactagccatctcttttcctatctggatgatgaagaagccttacacattttcatcatcatgtatctatgcagagaatctttctgtttccccgagagtcagattttgaactcaaaagccaagcatgtacagatgaatgtagctgcttgcctgcagaaaagacccaaggaagaaaggaaatactaggagaaaaaaattaagtggtattccaaaatagcctttgattccatgtgttatcttatttccttctcacgtaacaacagtctggagcgtgggagccccaggatgttcttttgtttcaatccaatcagatgtatattgagaaaggtcagaaaggcttgtgcggtggatcaacacttctttaccacgaaagtcaaatgctggaccatcccttaaggcgctcattatgttcttcagttggtggccaggacacattttggcttctaggcagtgtggccatgtttcttggtcatttgtgccagcttttattttcttcaaaaaatacccattgcgtgcctgctatcatcagagaagaaaagacccagtggcctgggtcccctgttgtagttgtttctggttggagtatggatgccctggggcagtagtgggaactgttcctgagggtagcagggagacatatttctgcaggatataccctgaggtccatagagagcagcaggagggttttaagtagtctggtaaaagttaactgcaggtgactcagatggattcacttgactaaaaactagatttagaaacagtcaacaaaatgaaccatggactaagactttgcaaatgcaatttctacatctcccaaatttgaatagtaaaacaggccatcgtgaagaccattgtgagataatagttgtaaaaagccctttggaaattgtccaggactgcacaattgtaaagaggacagagatagatcactttggagacggaaaagaggctggcaattttcttgatcatttttctatgaaacttacccaggggctgtgttttattcttcacagcaggatgatatcaactatttaaggaaactctcttgagataaaagacgtgtatatttgttctctggagcaaatggtccctccctgaaacccaaaataaccctgtccgtggttccctctcctaacatcaagcatcctctgtcctccaacctcatcctcaccagtacaagctgttggacctctgctgggcgcatggtgctattcaaggataaggtggagaaccctgcgtatcccaaaggatgtggcacttttttcacaatgtttggtattttccagctaagtagcagggtgtcccagtgtcaaacgagatgccacggctgggcccatgcatctcgtcatgggtcagggtcagtttgttttctgaacacagataacaaagagccaagacatatgaaatcctcaactatatgttacagctgggcacaatggatcatgcctgtaatcccagtactttgggaggccgaggaggtggggaatctcttgaggctgggagttcaagaccagcctgggcaacatagtgggacctcgcctctataaaaaagaaaaattaaaatattagccaggcatggtggcacatatctgtagtcccagctactcaggaggctgaggcaggaggattgcttgagcccaggattttaaggctgccatgagctgtgatcacacgactgcactccagcctgggtgacagagcaagaccctgtctcttaaaaaatatggcatggtagctcacacttgtaatcccaacactttgggaggccgaggcgggtggatcacttgaggtcaggagtttgagaccagcctggccaacatggtgaaaccctgtctccattaaaattacaaaattagctgggcatggtggtgcatacctgtagtcccagctactttgggggctgaggcaggagaatcacttgaacctgagaggcaaaggttgcagtgagctgagatcatgacactgcactccaacctgggtgacagagcgagtctcaaaaaaaaaaaagggaaatgaaacgatatgtttctccccatgatatatttctttcctggtgccctctgttgatatccactcactgacataccacagtgtgtgcccttgttcagcagagtgcaggagggcactgagcatggaaggcaaatgcttcaagtgtgtggccactcctcacttcctccatggctcacatcactaagtcatcctggctatctttctggcttggcctgggcaatgcttcagaaccctcaaccgcgtgccaagaagccactacctgtcctgtgcagttggcacaggagatagcctctacctaccaggcctgggaatggggtcttggtatgtcatctgctcagatgatggagacaacagatgaaagacagaaaggagaaaagaaggctgagagagagggtggggggtgggaccagaagccagttggccagagcctggaagtaggctgtgggtgaggctggcttgagaacagtctggagttgccagatctgtcttgcactgtgctgtctttctctcctttcccttcccctacctcctcttcctcctccccttctcttgccacctcctcctccccttctctcctctcctcgtgagcaggcagagcccgccagcaacccccactgtgcccactctcgctgttctcctccactctctctccccatgaaggaagagaccactggagtttgcatgtaccctccaatcaaaacgaggctggtaggtaccctggcagggagaggggcctggccaggagaggtgaggtgggcaggagccaccaggcgaggtggaagcctgggtgggcgtgcagaagccccagatctcgggcagagcccatcgacaggtgccctcactccagatggatggaggatttggagtccagctggccctggtcagtttggaacatgcagctatggagcccacttcgcctctaggtctcaagaatcaagaagagtttgttttcctagaattttgatgagcatagatgctttccccagagagaaatatatgctttggtactcaccagacggactcttatgttgcatttctattgaaaataaaacttctttaaacttgtcttcttctgctatttatcaagctaatgatgtaataggagtgctacctgacaatgtgaacaaaattacctgtcatcccaatttagcatgattttttgtcatttttacatatttccttctatttattcatatcattcataattttacatagttaaatcatagtaaccatattctctcctgttttcctcttttcacttaatgctgctatgttgtttctagcttgttcttgttaccacattatatgactatttgtatttcatcaagtgaatggtctaccatttatctaacacattctttactacaggatgtgcgctttgttcgcagtttgtcattatttgggagaacacatatagctttttgcatcaggaattttattttcttaggctataccctgctggattaaacatggtgactttggcttttgccccctttctaaagtggttgtgctaacagatagtgccatcagaagagagtgactttgcttttctccacagccttagcaacacagagtgtaattgttgaaatctatttttctaatttacagcaggtataaaataattctttgagattgctaactttcacctttctttcatagcaataataaaccactttctggcagggcacagtggctcacgcctgtaatcccagcactttgggaggctgaggcaggcagatcacctgaggtcaggagtttgagtccagcctggccaacatgtaaaaccccaactctattaaaaatacaaaagttagctgggcatcgtggcacgtgcctgtaatcccagctactcagaaggctgaggcaagagaatcatttgaacctggggggcggaggttgcagtgagctgagattgcgccactgcactccagcctgggtgacagagtgagactccgtctcaaaaaataaataaataaaccactttccctttctgcttcatgatgatctgagagtcttatctgtctgttactttctgctaggatattggtctcagagcaccatgctgactcaataggcaacaagaggagaatgtaccccaagacttcaccccaagggtccttctctcacctgagtcaaaaaggcaatttcaggcctattctggcaattttgagatgtgtaaagagaccaaagaaatttgggggaaggggagcaggcttgggctggacatctcagtacacgtggcaaggatattgtcatccccacatgggggagacttgctttacccatttgggaaagcttggctgatttgggtctgagctaatgtgttcttactcatccctgcctcaccctcccattggagccactgaagagcattgagtagctatcccagtgtccacaggcaagacctcgagacacacaaagcctgctgcccctgggcagtggtggccttggtgtcttgcctgcagccctctgctggcgggtggtatggtatgcattcaccagcaggtgtgcagacagtttctgtcccccaggaatgtgcacaaagctggtgtcagagtcatctggttcctgggcctgatgacgtaccctaggccagcttgaaaaaataagcccttccatttcccaagttctccaggaggccaaagacaaaatgaccaaagagaaagacatggaagtcaagagtctttttcaccaccactacctgatcagctgttcgtctggcctttttcagactagctcagtactacaggtactcccagcactgggcatctttgtgcatcaagccatctgttcccaaaggccgtgggggcaggattctcccatgcttccacgggtttccctgaggtctccctctactggccaaagcgtacagggagtccagtaactgaagtgattagacagggaatactttctagcttaattagcccagccgccttgtaccctgcctgctgtaagagaccgtgtcccaggatgtgacctctcagcagcctctaggccattcccacagctatggagaagtcatcagaagccacctcaggcaactctgactccctcattatccaccttgattgtggctttttatgagtcaggcctggaaagccaagcagatcccgctgaaggcagctccagggggaggcaagtgtgggggcgctctaggaacacgagactccaggctgtcatccctgctgaggcccgtcctgcagtccaactccaggcacagatacaaccaccagctcacactcctgagggaccctttgtatgtgcccttacacgagtgatgaaggctctgcgggggcacccctgaatcctttggttccattttaaaggtgcgctgccaaagattgcaaaactttgttttctaatctgaaggtaacccccttgtctttctctcttttgaagataaaaacattcccggttgatacaatgaacccgtttcctgatactttcaccacagggccacagtttactgtaagtagatccagaaaacagatgtgcattttaaacccttgttcccatgcggtgtgcttttctgcgggatgccagacagcaaggtcaaccgcttcttttgatcaccgttgaactctgtgaggttgggaagaaacttggatttgcagtctgcctctattttattgatgtgacattgacataaaattaaccattttaaagtgacaattcagtgacagtacattcacagtgttgtgcagtgaccacttctatcagttccaatacatttttattgcgtcctccaaaaacctcacacccattaagcagttcctcctcattttccctttgttcctacctgctggcaaccaccagtctgcattctgtgtctgtggatttacctagtctggatatctcatataaatcaattgtatcatatgtgaccttttgtgactggcctctttcacttagcataatgtatttgaggttcatccacgcatgtatcaatacttcatttctttttttgtttgtttgtttgtttttgagacggattgagatctgttctactgccaaggctggagtgcagtggcacgatctcggctcacttcaacctccacctcccaggttcaagtgtttctcctgcgtcggcctcctgagtagctaggattacagctgcttgccaccacgcctggctaatttttgtatttttagtagaggtggggtttcattacgttcgccaggctggtctccaactcctgacctcaggtgatccacctgcctcagcctcccaaagtgttgggattacaggcgtgagccaccatgcccagcctcatttctttttatgatggaatattattccattgtatctatatactgcaatttgtttatccactcatttattgggggttttgggattgttttcaccttttggctattgtgaatagtgctgctatgcatatgtgtgtacatgtatctgtttgaacacctgttttcaattcttttgggttggatcttgataatggtgtggtcttaggtaggtcactttactaccctgaccaccagcagctttttcttttttgcttttagagatgaggtctcactatgttgcctaggctggtctcgaactcctgggctcaagtgatcctcataccttggcctcccaatgtgctgagattacaggcatgagccaccatgcctgccccctcttcttacttaaggtgaaagtagtagtaagaatatcctcctcatatcctgttggggcaaggatcaaaagggaccaagaatttgaaagtgttttaccaaccacaaaacatcccacacctgtcagttatgattgttgtttctcaaggctggagaggcagggtgctgtgatgaacaagaaccagtcaccctgacaacagacttcttgtcaccacctctctgggtgtcactgggcagcttatttattctgccaaggctaggcacagtggctcatgcctgtaatcccagcactttaggaggctgaggtgggaggatcgcttgagaccagaagttcgagatcaacctgggcaacatagagagaccctgtccctacaaaataataataataataaattagctgcctgtagtcccagttacccaggaggctgaggcgggaggatctctggagcccaggaggctgacgctgcagtgatctatgactgcaccactggattccagcctgggcaacagagtgagaccctgtcttgattttttaaaaaattctgccaaatgtttaaatcctgtagtttcctcatctacaaagagagagtttgataatgttcatgcttcttttcagggctcaactcattctttaaatgaaagcttctgcagaagctcactgtataatgagcaattagatggagcagaagtgaggaatctggggtccacacctccttcctctcactctgtcctcctcccgggaaccagagcttgcaatttctatgatccctgaagctccttccgaagggtttttgtgccatctggaggatctgtgaggtgggctgtgggtggctaaaggtagctctaagtgcagtcttacgagatggatgatggccactacccaacatggcttcagccacacagggagggagagagcagtggctgattcaagtttcagaggatgagcagaggtgggaaggtgtccagcagggcaggcggagggaaaaacaggttcctagaacagtccatttctagggtcatgagctgcttccagcatctgccttttaagaatgagagggcagagacatggggctctgccagaatgttagatgctctttccctgacactcgtcctggctccctgcagtcttgctggacacagctccccagctggaagctccggctccacctcccttggttggccatagtggggcactctggccttctgcccagccttggcagtgctgtgagacactcagggaagcccttcccgaaagctgggggccaagatggagcaggaagccaatggcagaaaccatgctgggacttttaagaactgagcaagagtggctcgaagacagctggagcagcagagggaacagcatgagccagacccccagggcgggcggggtcatcacacattcaagggactgaaaaacaggccagtgggactgggatgcggaaagcaagcagggctgggtgagagaggaggaaggggatgtaggtggtgataaaactggaggggcacaaccatgttggccttgtaggccacagtagggattctgatctccatcctacgagcaacaggaaatctttgagggactttgagcagggcagtgacagggcagatgcacttggaagggatccctgtgatcacagtgggaggacagtggcatccaggcagagtggattcaggacagtagcctggaaacgcaggacagtggcttaagggagagagagcagaaagcttgacccacagtggttttgctggtggaggtggacagaagtgcacagatagggaagatatttaggaggctggtaagattcaggattagatgaggcagagagagggtcagaaatggttcccatatttctgatttgcagaatgtggatggacagtgggtccattcactgagataaagaaacttggaaaaagacttggttgggagagatgagtttgcctttggccatgatggattagaaatgcctttgaaacatccaggtggacacaatgaatgggcagttggaaatccaagtctgtaactcaagagagtggactagactggaaacaatgactagggaggcagtgacaggtagatggtaacagaagccaagctcatgggcttcagcttctcaattttctcacccctgtgtgtagtgttctcatctccttcctgccaagatcatgacacttgaactttctgcaggtttggcctctccacaggcctccagacctatcctggcgacagtgacaggggttgtttagcagcgctgggaagctctgcacaaagttggtctggcagtcgatctagcattgatggagctgggtttcaacagctgggctcttgcttgatcccaaaaccagtttctactttgtattcaggtgtattaactgggtctctgctcatactcagccgagtatgttggtccatctagggtggggagccctgcctggctctggccagatttctgctctacatgcttctttctaatctggctctgtccttctgttacctgctttgttccagtggaagcttgttcattcattcactcattcatttcctcattcaacaaatattaaaaaacagatacttagggttgagatttaataatgtaatttttactgcttcttcaaggtcattctttagtgaaactggctttttttttttttttttacttgaagtatatggcaatcaagaacacaatgactactagtacagtttggtgccactacctcaattcatgccaaggccctgccccatttacttactatcacctttgcaccatcagtgcaaattttcctcttttttcagaaagaataaaaaatggcatcaaaggctgggtgcagtagctcatgcctgtaatcccagcactttgggaagccaaggtaggtggattacctgagatcaggagttcgagaccagcctggccaacatggtgaaaccccatctctactaaaaaaaaccccagttatggtgtcagctagcccttgttctgaatactgttcttaacacttacacttactaatacaaaaattagctgagtgcggtggcaggcacctgtaaccccagctactcaggaggctgaggcaggagaatcacttgaacctgggaggcagaggttgcagtgagctaagattgtggcctccagcctgggcaacagagcaaaactccaactcaaaaaaaaaaaaaagaagatactgctcatttgatgatcagagtgtcttctttagaaactcatgtaataagtttctccaaggtcagggccaagaactagcatgaaaaatctagttataaaatatatagctggtattatcaaaaatataaaacaaacaaaaactatgcattgaaaaaatactaaatggccaagcatggtggctcacacctataatcccagcactttgggaggctaaagtgggaggatcacttgaaaccaggagtttgagaccagcctgggcaacatagtgagactgtttccacgaaagattaaaaaaattatccaggcatggcacgcacctgtagtgacagctacttgagaatcttaggcagaaggatcacctgagcccaggaggttgaggctgcagcgagctctcattgtgccaactgcactccagcctgggcaacagagtgagactctgtcgaaagaaagaaagagagagagaaagagaggaagagagagagaacctgtgaggaaatatactgatggcaacagtaaggaattatggaatttcttcattgatctacttttttttttttttgagacagagtctcgctctgtgcccaggctggagtgcagtggcgcaacctcggctcattgcaaactccgcccccaggttcaagcgattctcctgcctcagcctcctgagtagctgggattacaggcgtgcgccagcgtgcccggctgattttttgtatttttagtagagatggggttttgccatgttggccaggctggtcttgagctcctgacctcaggtgatccacccacctcgacctcccaaagtgttgggattacaggtgtgagccaccgtgcccggcctgatctacttttatatatcttctaagctttctatatacaagtaaacagaatagtttgctatataatgaaaatgacaagaatatattatcctctccaaatgagacagtatactctagaccagtagttctgaagctttattgtaattcctccagaagaatcacctggaggtcttgttgaaacacgtattgttggacttcatccccaggcattcttgggtcccagtggtcttgggtgaggcctgagaatttgcatttttaccaagttttaagataatgctgatgctgctagtctggggcccatactttgggaaccactgctacagtaatgaaaaaccccagttatggtgtcagctagccctggttctcagtactgttcttaacacttactaactgtgtgaccttgggcagattacttaacctctctgagcctcactttcccccataaaatcagttttaaaatatacatttgttttcaccttttaacatttcccgatatcagaatgtttactactgggcatgacaaagtttgatagtgggcatgacaaagtttaaatggctacatgtttctttctgattggcaaatgcaaaaatggtgcatcttacaactgatggtgcctaagatgtgaggaaatataatcgctaccttaaagggttgtcaagagttaatatgtgtcaagtacttagcatggtgtctggcacaaagtaaaatcacttaaaatgacaatcgattttagctggtagtgaaaaggaacaggaactgtagagtaaggcttagggagcaactgacagtgtgaaaatggaacccaaattgagattgatctcctctttcctgtttcttctccaggcagacttcagagacagtaaattacagtgctgtcctggcccgacttccccgctgatcccagcagcgaccctgaggcctttgacagagaccgtctccacagtgcagaccatttacaccacccggaaacctgtttctctggcagccaggtaggtcaggtcagcaggttccgacaggtaattctggtgacagggaaaccagggagactctaggttcattgtgtttgtgacacgtacaggcctttcctacattctttcatttattctgtaagtatttattgaaatgtctataaaggggccaggtgcggtggctctcatctgtaatcccagcacaagggaggatcccttgaagtcaggagttcaagaccagcctggctaacatggtgaaaccccatctctactaaaattagccaggcgtggtggtgcacacctgtaattccagctacttgggaggctgaggcaggagaatcacttgaacccagtaggtggaggtttcagtgagctgagattgcaccactgcactccagcctgggcaacagagtgagactttgcctcaaaaaaaaaaaaatgtttacaagggtaggctgttagaggagatagacaacaaatgagtgtgtgtgtgtgtgtgtgtgtgtgtgtgtgtgtgtgtgcgtgtgtgtgatattgacaagggatagggaggaaaatgaaattgtgaatggcaataaggtatcctgggatggcctcaatgaggtggcatttaagcagagccctgaaaagggctatagagaaagctgcagatacctgggaggagtactgcgcagagcaaccagccagtgctaaggctcctgaggaagcatgtgcctgacatggttacggaagtttaaggggccagcgtggccagagcagagtgaatgacaatagaggaggcctgtgaagttgtgggttaaggccagactgcgtagggccttgttggctacagtagaaactttgttttctaccctgaatgaaattattaaacttggttagtgcctttaaagatgtgtattttgccaggcatggtggctcgtgcctgtcatcccagctactcaggaggcagaggtgggaggatcagttgaggccaggagttcaggagttcaagtccagcctgggcaacatagcaaggccccatctctaactaaaaacaatgaaaagatgtgtatttactctgtgtgtgtgtgtgtgtgtgtgtgtgtgtgtgtgtgtgtgtgtgtttaaacagtggagacaggttacatagatatgcaactggacctgaggtccaaaaagtcagaggcaacttctcaaaacagccaattttacttcattcaatttgattcattaaaatataattaattatttgttacaacattccctcagatattcatcaaatgaaagcctgggagaaaatgcacatgaaaccaatttaaagcatgatttaaataaatctaacccctggacatcttcattcaaaagtctttactgagggccgggcttggtggctcatgcctgtaatcctagcactttgggaggtcgaggcaagtggattgcctgagctcaggagttcgagaccagcctgggcaacacggtgaaaccccgtctctactaaaatacaaaaaattagcttggcatggtggcacgtgcctgtaatcccagctatgctggaggctgagacagaagaatcgcttgaacctgggaggtggaggttgcagtgagccaagatcacgccactgtactccagcctgggtgacagagtgagactccatctcaaaaaaaaaaaaaaaaaaaaaacactttactgagtggctgccatgcaccagatactgcgcaaggctctggaggtttagagatgaatgacatatagtcagccaggaactctcagcatggtgggactgagaaaccagtaagtagccaatttcagatcactgaaatgctagcaaatgtagatagtcctcaaggagtctaaaaaagaaagtccaacactgagatcaggaaagaacctgggagatgatacttaagctgtctgcttctgcaatttttgagggattgtctcactattttgtcacatacttttttttagtgcagagacactccggcaggaactggagagagagaagatgatgaaaagactgttgatgaccgaactgtgaaattctccccttgtcacctggaagatggcatggtgccttctgtccgtcttctttcttcgggctttgtgtgctcactctagcacagcatacaagtgtgtgctctgttcgcccaggtctccatggttagttgaagccaatttctggcttgacttttatgggaaaagttattttatgtctcctaagcattagagtttttctattactctatgtagttgagacaggatttgataagtctaggaaaagaaagatgggaaaacgggattccttttcagaagtacctgtgtgtatctgttaataaccacaggggttaatatgatgtaggatcttttactatcaatttcaaccatttgattttgtatgattgaaacttgcaccgagctttgactgtttgttaaagagtcatttttaatgaaagaataattctttattgctggtttttcatttacactgataaatacacagatcttataaagtctttaacattcatttgtattcagatgtgagtagaagaactaaaaaaagaaagttacatatcactatgactgaaggtacttcagcttaatctgaaatataatttaacttgtgaactccttggatatgatattatttggaataaacagaatttatcattgaacccaaagtaggaaatgatagcttacattgtctaaaaatccttacaaggttaagatgattcaatatcaagaagattcagaaaattatttctaaagttgatcgattcatgtcgtattgatagaatcttgaccagaagaaattttgctctttttatatagtttcaagaaatgtgtttttaaatttttattaatgcacttgaacaactttgcaggaataaagcaaccccctaaccacaaaatatccctctaaattagttccctagctttctcaatgaatacacacatatttttacatagctatgatcgttgtgtacattctcctttgttttacttctcggcctaacacttgtctcctcttgtcaacacagattctactctcaccaatttaaatgtctttatatccatgtaacatgggtaacctcacttcaccccattattagatatttgagttatatctaatttttcactcttataaatagtgctgctatgaatgtctgtaaaaaaaaaaaactgctccttcttttggattattcccttaggaatatctccaaagagggattacaaggtcaaagagcatgaagtattttatagctcttgttttatattgccagattgctttctagaaagatccaatctttgggttggaaggaccttaaaggtcatctagtttagcctccccaccccctctgaatgcttgaatcccctcgacaatttatgatgccaccagcaatgtataagcatttctgtttaccaatagctctgccagtattgggttttgccatttttatttatttttgctagtttaataggtatgtatagttgttcttgaagagttgttttatttcattaattgctagcaaggctgagcacttttccatgtgatgatttactagttgtatttccttgtgtgtaaaatgttcattcatttcttatgaccacttgttaagaggaactgatctcatatatttgtatcagaactgtatttttatgttatattgtatagtttgctctcctgcccctctccttaaaactgaatggtgccaataatttgatactaatgactacaaaaaaaggtaatgcctcatttactagtattgttgtaaaatgaggaatgtatgtgaatattcagataaccgaggattaaccctttaagtgctgaatctttaaaattttaatatatttttttttgagggaaatctttctaaaatgtattacgcacttccctgccttagtaaacagagtatactggagagtatttaaccttttcttgatgagtcatggtcatgattataaacatcagccccttttataccttggtacggtgcagtgatatcattaagagctatcaatatgtgtagggcttggcttggccttttataggatattatgctgttctcactgatggttttttactgctctctgctctgtcagtggagctatccggggcaattgtagcgtttgggtccttttacccctatgtcccccggctatacttttaaaacagctttagctgttctttatcttgtgcacatgatacaaaatatgttcccgtacaatatggggctgtcacttcttgccaacccagcaccctcttcctcttctaacctgctttctgaggcttctgctcttcacctcctgctcgctgatggaaacctccagggcaaagctgaaggtttcttggggaagccaggaaagccagtatttcctatgtgtcagatctgcttggcttccaagaagggatgcatgggctttttggccagtgtttccaggaggctctgggcttcctgcttcttccccgcttcccccagagttcacagatgttgaagtttctgaaggttgacgtcactggaagtctgaccacaaacaagttggctgttactgtatttgaaacccagtacctttggcagctcacctctaaccagtaaaataagaggattccatggtttc

SEQ ID NO: 706 - DNA, 92599 bp, Homo sapiens
tccctccggccctcggcgggcacctggcggcggcgggcagggggcggcgctgcgcgcgtcacgcggctgggtgggatagcgggcaggtgacacccggcggcctcctcccctttccaacccagtcggcggccgggacagcgggggccgctgtgaggagctccgcgctcgcgctgccagtcgccgccctctctcccgcgcgcgcccggcgcttcggctccgctccctgtgcggtgagtgcggggttccaggccggcgggcaggggccaaactttcccggcgcgcggaggagaagagactggggagggaggcagagccgaggggaacggcgtcgggagtggccggatggaggaacttgggcgcggcgcgcgagaagtgggacccgggtgcgggggccccgggagcggggccaggccctccctgggctcgggaggcgcttgggaagttctgtccccgctgcctgcgcgtggggaggaccgaggcccttttcgccggagcgcggggccgcggcgctcacctgcgccttctcgggagcccccacccggcagcatcccgaagggaaggtcgggcccggtgggcgcgctgcggagcggagcctggactggggtcccgcgcggcgctggccctgcggagcggagcgggaggggcagaggtgctcgccggcgggactgggagggagaaggacctgctcgaccttggacgcggaggtcattttcccagctccggggtctggcctcgctagccacccccccaaattccggagcccctttctttctgtttccttccttcccctttgggcgctttttttgctcccgcggccagatgaacttggggcgctgtcccttcggctccccgagccgcatcctgtcttggtggctgctgctggccgggaggaggctgatgaatacagagccgtggaacaggtcgtgccggagatggaaacaggaaagcctgttgttttgtcgtcccaggtatcgttggttctttgggaaatgggctttcccaggttcgttgggaaatgggctttcccaggttcgttgggaaatgggctttcccccttcaagtcagagctgtttcaaacttcacccggtgcggacagagcgctctttggagctccctggggaactcgggacgggaaggagcgggtctttacacctgtcctgctcccagtgtagttagtcccgcgtcgactgaagaacagttttagcgacccgagttcctcgccagtggtcttttccctcttgctacgatctcccctcggaaagcatgttcacttaaccctgtgctctcggattaccctttatttcattcctcacttttattgcttacgtgctccgaaagggtcatcgatacctggtggctgcctctgcgttcttaccacgcacccgcttattcattccctttctttgtagtttctcttcgtactactgatcagaaattggtctccccaaggtcaccgagaactaaataaaatccacccctcaccccgtggcagacatttatcagtgcttaggtgccaggcactgatgtcagttcttgtgtaaaagcttttaatcttcacaacgatcctgggaagtagatattaatattattctcattttaatgatgaggtaactgaggcacggagaggttaagtaacttgcccaaggccacacccatctcagcggtaggagattccagctctggggttctgtctccagcactggagctgttaaccactgtcctacactgcctcacctagagttcgtttgctcgtccttattttctgaagtcccgtgctgtttcaggcatcgttgaccaggctgtcaatctcaggtccctcttttccttcttatgtgtctttatactagtttaggatccccacaccctccccctgcccccgctttttttttttttaagaaaaatagatttttgggactttgttacttcatctatcacctgtatttatctggcttaagattctgtgctttccatgtcttcttcagttttagtgtaacgtctgtcagtgcacattataatattccgcttggacttgcccggcttttccccaaaacagctccagatgctcatttccattaagggtcctgccattatcctggtctccaaggtgccgtgccattcctctcccattcgttaaatatcttctatccaatttttacatggtgtcttctagcctttatcagtctcgcccactcccatcctctcttcaccactctccctcttccccactttgaacacatatgcccttctctgctatttgttatcatcttttatgtttgctttgcacaaaaagattgcaaacagcttaggacattaaatcttcaggccttacagctagtagttgcttgataaatgtagaagatgatacagtataaattttggtagcacacatcaggcaggtttgatgatggaaatttttaagccaggttttacaggaagttacggagtttgcattggtaaacgtgtaggagctggtagacattgtacatgaaggggagaaaagcctgtgttcactccattgtcacaaacaggtacccagctgttctgatgaaacattacatttagaggtataatgaagcaaatcagcagaaaaccatttatccttatcttgacaaaacaaaatatgaaaacacataaagttaaaaaaaaacctttttattgaaaaacgtagcacatacataaaagtgcataaaacataaatggacagattaacacagtagatgtattcagcaatagaacgacagtgttattctggccatagataggctacagtcaggccaaataggaatcttttcacaaaaacctgtataaggtgaagtgggcctggactgctcccaagaggcattgccaagaaagaattggctgtgcatggagaggcttgaggagagagaaaataagactggaaattggtaccaaaaggataagatcagggagccaagaagagagttcagacccactgaacataattctaccacaatgaatatttaaccaggttgcctttgtctctctctttttttctatgcatattttccttcatcatactccatatagtattttagtattctcaggctgggcacagtggttcgcccctgtaatcccagcactttgggaggctgaggcaggtggatcaccttaggtcaggagtttgagaccagcctggccaaaatggtgaaaccccatctctactaaaaatacaaaagttagctgggtgtgttggcacatgcctgtagtcccagctacttgggaggctgaggcaggagaatcgcttgaacccaggaggcagaggttgcagtgagctgagatcatgccactgcactccagcctgggcaacaaaggagactctgtcttaaaaaaaaaaaaaaaaaaaaaggaaagtaattttttttagtattctgtgttttccatataatacctagtaagcatttttcatcttatgtaattttcagaactcatattgtttgtattctagtaattataatgtgatttacttaactaaaactctattgttggacaagtatattagcaacaaattataaacaacctaagttatagtaatacttatctttgcagttgtatcattttacaagttgggactcatttcctaatgatactgttccagaagtagaattacttcgtcagcaagtatggtcatttttatggttctcaatacatgctgtcagatttctaaaagcgattttaaaaagaggatcaatgcattttacctaacttctctctctaggaagtaacagcaattcaattaaacatgaacagtattattaaatgttgtattagtttcctcaggctgccataacaaagtaccaccaactgggtagcttgaaaaaacagcaatttattgtctcacagttctggaggctacaagtctaaaattagggtgtcagcagtgttgaacccttctgaaagctctgagggagaatttgttccatgcttctcctaggttctggtgacagcagcaatctctgatattccttgtgctggcatcactctaatctctgcttctgtcttcatatgcattttccctttgtgtctgtgtcttcacataaccatcttataaacacaccagtcatattggatttagggcccatcccactccagtatgacctcattttaacatctgcaaaaattcaatgtccaaataatagcacactgtgaggtattgggggttaggatttcaacatatcctctttggggcacacaattcaacctgccatagggttttcaaatgtgcataaaagaaagcgcctatctgcaaataatttctaggcaaattgagaaagtaggattttttctaatttttgagatttgtttattctccatgatgtgccacttgtgcttatcagttttaagatacagaaggatgctcttttctccccccgagacagggtctctctctgtcacccaggcgggagtgcagtggcacagtcatggctttccgcagcctcaatccccagactcaagcaatcctcccacttcagagtccccagtagctgagactacagacacatgtcaccatgcctggctaattttttgtatcttttatagagacagagtctcactatgttgcccacattggtcttgaactcctgggctgaaatgattctcctgcctcagccttccaaagtgctaggattacagatgtgagccattgcacatggcctggaaggttgctatttaccaaacacggaattccggagccatggtaaatggtagcatgttaaactgagaatagccagaatttcaagaagatacatcacgtagcatggaaagaagcatgccataaacacacttttagaaatatgtcttacatgtgtttcagtgactcatccagttttgaccatgcacagttgcaaaaagttgaaaactaataccagttgggcattttatatcactggtctttgaaaaaatttgaaatttccattattcctaattgatttctaaaagtacatattattacattggcaagtgaaatcactctttttgtaaatgatagaagttggcataccatcataatttcttttcctttctttttttttctgagacggaatcttgctctgtcgaccaataaagttgtgcgatcttgcctcactgcaacctctgcctcccaggttcggtgattctcctgcctcagcttcctgagtagctgggactacaggctcatgccaccatgcccagctaattatttatttatttatttttggtagagatggggtttcaccatgttggccagtctgttctcgaacacctgaactcaggtgatgatctgctcacctcagcctcccaaagtgctgggcttacaggcgtgagccatcatgcctggcccatcataaatatatatatatatatatttttttttgacactgttttgttcttgtcgcctgggctggagtgcaatggcgctatctctgctcactgcaacctctgcctcctgggttcaagtgattctccagcctcagcctcctgagtagctgggattacagacactcaccaccaagatggctaatttttatatttttagtagagacggggtttcactatgttggccaggctgctcttgaattcctgacctcaggtgatctgccctcctcagcctcccaaagtgctgggattacaggcaggagccaccacacctgactcataaatatttttaaacagactattattcaaatgagataagtttccacatagcttacaaattccccatgttaaagacaaatcttaatcaatctggataagcagctacttaagccatgaacaccagcagccctgcttcttggactttctaatgtagggtaaaagagccaaacctagataaaactggggagtttcagaagctgcacactcaacaaacatttgagtgttagctttgtgtcaggcaaaggggctggcagattgctaaagccagtccaggtccatgtgagttatagacaagtaaatgtaagttacaaaattacagttcagtatgataaactgtgctgtgatatacacagaccaggtcctggggaggcaaggcagaggcgggcagacaggaagtccttctgagaggaaagaaggaagagtgcgagttagggcagctgagaaatgggacgaggagtgggaaatagaatctagggagagagtgcaggtgcgatcagggagatgcagatactttaaagtaactaggaagagggtgtgagttgaagttgcctaggcatgcagaggccaggcttactgagagcattttttgaccccataaaggttttggattttatcataatgtcagtggggaatcctgggaagcctgtaagaaggaaaaggatgtgttaagatttgaatctctctggcgcttgccatttcacctttatgaaacctctcctcctcccatcaggcctttatctcatttccctatctgatctggaaaggacagctaccttccttgtttacattagatatcttttttttgagacagagttttgctcttgttgcccaggctggagtgcaatggcatgctcttggcttactgcaacctcccgtgttcaagcaattctcctgcctcagcctcccgagtagctgggattacaggcatgcaccatcatgcctggctaattttgtatttttagtagagacggggtttgtccatgttaggtcaggctggtctcaaactcccgacctcaggtgatgcacctgccttggcctcctaaagtgctgggattacaggcatgagccactgcgcccagcctacattagatatcttgattatgcttagcttgcatgtgaattttgaaacagaaaatcaacttcatgggcatcatctgtacctctgtccttacaggatactcaaggctgcatttacatttaaaacatcttattgaaaattatggggtgaaaggtttgtcatcttttaggcataagtaatagttgcaatgaatctctcttttttttgaggtggagtctcactgtgtcacccagtttgaagtgcaatgttgtgatcttggctcactgcaacctctgcctcccaggttcaagcaattctcctggttcagcctcctgacaagcgccacccccaccccccactccccccccacccccccgccctaccacgcctgcccggctaatttttgtatttttagtagagacggggtttcaccgtggtggccaggctggtctcgactcccgacctcaggtgatctgcccgcctcagcctcccaaagtgctgggattacaggcgtgagacactgcacccagcctgcagtgagtctctttacttgtattttctaatgaatcctttgaagccagcaaagtctggctcatcatatgcacaggtacagaaaggtgaaaaaagcagaaagggtgctcaggctacactggtagaagtatgcagccaggatttaaacctaggtgtaattacaaggtttaggctctccccactctgaatactaactctctgggttgatatttttgagaatataggaggccctaggactctgatatcttacaatagttttgtgagggcgtaagggcaaccataaaaataaacccaatttagattttttagtgtcaatggtagaaacgtgagatctagacaaagagagtttcactagcagcccttaatctaaatacagccccatcccccaactcttctccttctttctgtcccaaatttttgggttttgtcctaatagcacgcttgtgatttgtttgtgtgtttattttaattaaatgctctaacaagggcagaacaaaagtaaagggcacttattacttaagggtgacttattttaagtctgttcaggggcttctctgcccctcagagtcttacctgtctttttgtaccttcttcaggcagacagtgctgtgttgcatcctgtaggacagaaagatttatgtctcagaaataaaccagccaacgaacaatgttgacccacattttaatccctttgctgcttatcattcagttagctagaaagcacagctgatagcttcatccttcatcctcttcttcgtgtgtgactaacaggtgtgactttaacttgaagaaagaaagaagatagaaatggcattcctaggaatccagagtccaatgacgaattattcagtagcttagggtgagttcctgagccaatgtggaatggaattttttaaatcaagctgtgagaaccactattcattcttctaaaggaaaaaaatggtagtggatgtgatatttaacataaaatatagtcagtgtttttaaataaaatgtgtatatatatatatggttgaacatatgcaattgccctttctgtaggtgaataaacagttggatgttggcagtttgcatatggttcatcctgattcaaatacaataccgttgacatctaacagttgaccaatgagcctatgctcttcatttccctataagcacatggggtggtgcccaggcatgatgaacagtggcttctagtagtcttcttccttctccaactgctgggttattggcttaacaacaatttattgtatttattgcaaacatgttagtgccagttatatttgttattgtgatagataatttagatatgcgtgaacttatgaaacgtaagtgcaaaaaaagaatattgttattgtgaaaggaatgttgaattctttggaaaggttccataaaagtgagtcactaaggggtcaggaaaactaaaaaaatcagaaagatggctgggtgcagtggctcacgcctgtaatcccaccactttgagaagcctaagtgggaggatcacttgaggacaggagttgaagacgagcctgggcaacatagtgagacatccatctctacaaaaaatttaaaaaataactgggtgtggtggcatgcgtctgtagtcctagctactccagaggctgaagtgggaagatcccttaagtccaggaggtcgaggctgtagtgagctgtgattgcaccactgtacttcagcctcgatgacagagtgagaccctgtctaaaaaaaaaattcaaaaataaaaacagaaattgtaaaaacttgaaaaatatcctgagcttgccttaaaagtgtgtgtagttgttttattttgttttgctttgtttttaattcacttagaaagttaaaactggaaattgtagattaagttctaggtatggtttatagcagaaaaatattggtgaggagctcttcctcaagtacagtcttgggactactctgtcttttttttttttttttttcaagatgggatctcactgtgtcacccaggctggagtgcagtggcttgctctcagctcgctgcaacctccacctcccgggctcaattgatcctcccacttcagtctcccgtgtaactgggactacgggtgtgtgccaccacgcccggctaatttttgtattttggtagagacagggtttttctgtgttgcccaagctcgtcttgaactcctgagctcaagtgatctgcccgccttggcctcccaaagtgctggaattacaggtgtgagccactgtgcccagcccttgggactactttggaaaattggagaattaatgcctatttatatatttttttaaaaagtaagtgtttatagtatctaaataaatttttcattctttgctataaataaatttttaaaaatcaactaaccaaaactagtcagaattcctgctcctgttagtctgactgtaatagtttacgctatagtgtagtaagtagtcagaaccttcacttagcattccatactaatggtatataatcaactcatacttcttattttatatcattttttgagagacaggatctcaccatgttgcccaagctgatctcaaatttctggcatcaaacattcctcccatctcagcctcccaagtagctgggattacaggtgtaagctactctgcctggctcatgcttcttattttaaattgggctttcattaataacatctatataacatttaagtttattttaataatgtgaaccggtcgggcgcagtggctcacgcctgtaatcccagcactttgggaggccgaggcgggcggatcacaaggtcaggagatggagaccatcctggctaacacggtgaaaccccgtctctactaaaaatacgaaaacaaaattagccaggtgtggtggcgggcacctgtaatcccagctacttgggaggctgaggcaggagaatggtgtgaacctgggaggcagagcttgcagttagccgagatcatgccactgcactccagcctgggcgacagagcgagactccgtctcaaaaaaaaaaaataatgtgaaccaatatgtagaacttagagctgcttcctacctgcatttaatggcttacataaaaactgaaagcaaaaatatatcattagctagagtttattaaacttgaaaaatttattagtgttattaagctgacaagttgaattggtcaaggtgtaacttattttagattcaaatagtaattataaaagtatagttattcttttctgaagtattagtaggttgatgaaaaaaggccaaacttataaaatgagaaaaataaaattatattttataataatagcaattattaagcactggctatattccagccactgtgctaaagtctatttatgccttatctcatttagtcctcacagaagccctagaaggtggtattcttcccatgttataagcaaggaaactggtgcaaatagaagtgaagaaccttgcccaaggtcacatgattagtgatagcactgggaatcactaatctagtttagtctgaactccagtgctcatgtgcttactacttcataacttagtactttaaaactgaatttaatttctaatgtaggtttaatttttttttctttttttagtgtaaataacttatttgggagataatcctagatagtaccagaagttggggagtggggaagtgagacaagaaaaggaggcggccaacacagggagtgttaatgaagagtctactacctctgtgggcacctggcgctcagtcccacaggacatctctcagcattgtcccacccaaggatctgagaattgaagcctttgctgggtcatgggcatgttggtcatttttcagagaaacattagtgttttgagctgcaaaggacctgagaggtcattcaggctgacctcttatactgttgaggacacgaggccatttcgtttggccaagaccacagtcctgtttagtattttgggaccagaaacaagttctcccaactagagcccaattgcttttctagctgataatcatattttcatcattagccttatttctgaatatgacttgacactgaatttttgaagctcttggattgcccccctccatctttgtctacaagtaacattaattactcctacagaggttactgtagaatacggcagggcgaggattatgcttcccccatgttacaagtacagaaactgaagctcaagtcaatgcaatgctgtgcctagtcctgaggcccatgtattataaaacctaaccctgaactatgagtaaaggtgtcaaagaaaaaactgtattattttagcagaggtgactaaattacctagcccaagccatggactttatctaacagccctcttccttttcttattctctgcccttagcacttgagtttatccccattaggtgactgcctgagtatctcactcatggaagtggcatttttggaattgggaagggggaaggttaatggagagttagtgcacattgctttgatctgcactctcaaaaaaaaaaaaattccggctgggcgcgatggcgcacgcctgtaatcccagcactttgggaggctgaggtgggcagatcacaaggtcaagaggtcaagaccatcctggccagcatggtgaaactccatctctactaaaaatacaaaaattagctaggtgtggtggtgggtgcctgtagtcccagcaacttgggaggctaatgcaagagaattgcttgaacccaggaggcagaggttgctgtgagccaagatggtgccactgcactccagcctgggcaacagagcgagactccgtctcaaaaaaaaaaaaaatctatcaatccccaatccttaggttttactatttcatcagtagacagagcacagagcaagtaggagttgccatctacttattaacaggcaaatatatgttgctgcttaattctgattgcaacactgcctgttgtgtgtgctctaaattcacttttagagaccaaaaattctgaggctccaagaaatttaagtgattttccccaaggtcacctgagtggtggctggcagacctgggttcctggaatacaaagattctgactatacatcctgctgcttactacacgttgccttagagtttattttcttatcttcagaaaaaaagtgctggtttgggagaggcagctgatatgcttatgaaatagtaatattgcagattttaaatatgatcatatataattcacattctacttttttcccagaaagacttgaaatgcttacaataaatatattaagatccaagcatagaaggggaaaatctaggtaatgcagttgtgataaatggaacactagattttaacagttagcccggagcttatattgaaagagtaaccacaactctaatggtttgttttttgcttctttaaaagcataaatatataaggtactttttgtcctagaagtaaagtgcaaaaggaatttatcaaattggccctaataaagaggatcttgaatcgctttatggataatactttaacagttttgctaaagatgcaaagatattttaaaaattaatattggttcttgataactcacgaattgtggatgttaatgaaggtaaactctttgaaagcatttctctaaaacctccagggctacgctaataagattctcctgatgatgtatacaataaatactctagcactagacagagaagaaccttttaaaacttgaggctggtctatggatggacttcagaaggtccataaactcccaaaacatcacatttgtgtatacatgtaatctctggggaggtggcctatagcaccatagtctcaaattttaaaagctattaatttagaaagggatgaaataatatatgtaaaatgcttagtaaaatttaacttactgtatacattataaaggattggcctttaatgataatattgaaattaggcagattaggttaacatgaaccaactgtacagactttatccatgttataaggacatgattattatagacagacactagaaagaaggtaatctcctgtgtccatagtagtttcatttctgttgtcctagttgtctaggaagaaaggtttttactttttaaatgttaaatcagtattcattcatttatgtaataaacattagctatttgcaatgtgttagacactggacatatgaaatatagaagtcatttctcctcattttttctctttctcttgcccatatgtgaattagcagcaatcatgtcagctgtgtcaacaaaatccatcctgaaccatctacttcagtaaacttctactcctgctgtattcccataatcaattctctaccaagcaaaaattattttttaaaacataagacagatcatgtactgctttgcttaaaagcctctgatgagagtttcagtttcacaagatgaagagttctagaattgaatggtagtgatggttgcacaacagtctgaatgtatttcattaatactgaaatatacttttaaaaatggttaagatggtaaattttaagttatttgtattttactataaattttaaaattgaaaaatgaatagtcatactaccaaaaaaaaaaaaaaagaaagaaagaaaaaaaaagcctctgatggtttcctcttgtacctagaataaaacccaggtaccttacctgaggttagaagaccatcaatgcccagctgtctgtgccatccagcatcactgtctttgtgctctggtttctgttcctctgctgttatccttcaggaccactcagctgccacatcctccccagtatcctagctctttctcactacccttctactgttgcagccctctgccccagttactattactttactttgttgtgctttattttcttcatcacttttgccactatttgtcttatttatgtttgtctgtttgtttacttgtatgtcttcccacaagaatgtaaactccatgaaagcagggatctcactgtatccctagtgtcaagaaggctgcttggcacatagcaggtgccaaatatttgttgaataaatgaatagagacatggtccccaaccccaaggacctgacagtttctgatactgtttgagtctcaggagccctgagctgtggttgtgagcaaggattttaagaacctgtcagccaggcctcacgtagagaatggacaatgatttctcaaaatgaaatgatcagggggaggagaaagaggagcagatgatgtaggaggcaaagagccaaaattacagtaaatgtttcctctattcaagggtagaataaactttttctctcttctatctccctacccatctaaaataaaaacaagagaaaacaaaagtataactatatatcagtagccactcatgaaccttgcctaagccaaatgtaaaatgaaagtgatgtaagatattgtatgtcacatttccagaaatacctgactcctgtttatcatctgcccttagagagcccattatgagcactcagttgtatgagtcaatatgtctgccttgccagaatgagaccaaaatcttaccagccttttcatcattccagaattatcttcttctctagtatgtctttctcctgtgacaatcgaaactcactctttccatcctgctgtcacaaacaggtagatttatagacaactgggttcatgtgttcattaatatttttcatggtaaatataaaagatagagggatttatgatatagacagattttctgtacttgacatgcaaaaatcttccatgtaatgagaaaattcactcattttttgactatattaataatatatgctgactttagaaatatagagaacttctaacagaaaataacaaataaaaaaacttataacatcaaagaaaacagatatcccttataatcttaccaaccagaaataacaattgctaacattttgataaactgctttgcggcttcttgtagccttttaaaaaaggttgttaaagtttttctctaggaaaagaattgggaaatatttagatgaggaacaagaaccatctcctagtatgctttttttttgaaagctctaaacataaaatataaacctttccaacatgaacattttatttctttcttaaaaaactcttattatagaaatttctaaacatttataaaagtagaatgatgtaatgaactgatatactcatcactcagaattatggctaatcttatttcatctgtaaatattccagtatacctctaaaaataaggactttaaaaaattacagccataccattatcatgcctaagaagttaaaaataataacttaatgtcatcaaatagccaatcaatctgaacatttttaaaaaccaccactttgttatgactaaaagtagtgagagattcttgggtaataggatgatacggagtctaagtagcaaattatataaatatcacaagaaaagttttaaaacaatacgagtaacttatttagctgtgcttattgcttatagataactattaatacattagtaaacaatctgtcattttatattttaataactttgctatttctttattctcatggtttaaattcaaaatgcagtgttcacctatgcctaatgatttttttaaaactctcctatgcatttttgggcttagcgcagggaaaaagtatgatctggatacataaaagtcagcagtgtgacatgtttccataaggttctatactatgatacagttaatatatttttctaaagctataaatactttacctgaagtaaagtaaaaatgagctgttaggtatatgttttgttaaattaataaagcagagaaaatccatttattcttagaatttcagtagtagaaataatttttgtgctcttaaagatatatgttaatttttaatgaaaagtgctaaatcctccatgtctctgcataatttattcctattataatttttaccatatgaggatgtaacagagagaatgcagggagcagcaaaaaagtgtacttggctgaaagattatcaggaatcagagtgcgaggtgagggtgaggggtcaaaggggtcctgttaatgaagcccacaagcaggaattccagcttggttccagactccactaacaaattgctagagggttctgaaaagacaaaggtcctggtgagaggtgctttgagctggggattcacattgctgcctcgacacactgttaggggagagggaactaggggtgtaaaatgtgggaaattgaggacttggtccagcacagagcctagatgggggtgtgcctctgtggatggaaaggagtgagaagggcagaaagagtgaaagaaagatgaagaaggagagattctgggtgtgcaggaaggatgggaggccaaggttggggcctgtaccacaggtgggttgtggtaccaaaactggtcacctggggaaactagggcaagggcatgtgttggttgtgatcatggaaattcctttatttctattccctattaatcattgcaggttaagttaataaattacatgctcatttgtagaatttgagacttttcactcttctgggcaattctttcatgatggggcatttaaaggtctagaaattattaggctttttcaaacatcaaatgtatgaaatctcattatagtagctaaagccagccagaataaccaggatttctttcctactcccaactaactaggaagaaaatccatggtatttgagtatcttgtataaaattgtctagaagaaaatgtttttctatgtttacctagaaagatatttgtaaatatttgacatgacagcttttatagggtagtcattgttttagtttcacattgtctacaatttttgtttgttgatgttcagctgttgtttgaaagggccatagttggaggaacctacattgaggaaatattgaattaaactatatattatccagataaatagtggaaggaaatattagtctaagttttttctggcatcttttccttcatatcaaaattacgtaacctaaaaattaagtaatgatatttttagcaatattgtattgcaaatgtatacacagattatgcattaaatcaatttgtctactagcttaggtgtgtaactacactttccctgggaaaatgttttcttcagttaaaataactaaattatacatttcgttctcaattagagatgttttttgcagacatggaataaatgaagatcctctgttgttctgaatctgtgttcatgtttaatttgttaaagagaattgagacaccttaataacaatcattttagtctaactgtactgaagaaagtagtatggatacaaatacagtctgctaacccagaggccatttatcatgaagtttcagtacctaaaatgtttctggaaatgagtaagcagagaaattatccccaagcagagaaaacaatgtcccaaagtcttttgagtacatctgtgctccacccagaaggaaaccccctggtttttaatctccacccacttagcactattttaaacattccaatgttgttgtttttctcatttcccatcccatagcatattagggaaaacaaattagaatgagtgagattttgtagaaacaggaatgctagtaacaaacagtaagaagagcagtagctaacaaactgatagggaggagacaggaaatttgttaaaaaacaggcactggcattagaaatgccttgcaatttggaacttttagtgcagggcaaagatccatagccataaataggggtagtcccagaggacactgctatgatactgttatcttaatagtatccctgaatcatccagaaaagttcagttataagatgattgaaatctttaaaaaaatgttttacagtaaaaaaaaaatcagaatcacagatacaggtgtatctgggcaggtgtatctttgattacacctagagataagcatttcagttatctaaaatacttttatgaaacactgcattagaagatgaggctggataaatgaactgtactcataaatacaaaacaggatgaattaatttgatcttactgttggttacttttcttaaccacccctctccttgagtaccatttatttttcctccctttctggcttacctgtacattttatagatacgtactatttggtgtatatgtaccgtaatacctcccctgtattcagatttgtaataggaaagaccattatgctttttgctctctataggattcatcagtccatgtgccctgcctgtccaccgctgggcattccttccccagatggggctccatgccctattcctgtccctacttggactgaacctatgactgccaattcttgcttgtctcaaggcagggtatttaaggctatggattcccacccttcctctcattcttgtaatttttggttactgaccaaaagagaaaccctttactgggtattatagcctttctattggctcctgttactattaaccatactttcagctctgtcctttattctttgagactggtgttccattgtgttccagttctcttgtatccccagtctcatcattttccaaatataactgaatcacagctctttccctcaacctcaggcccatacactgcttatgagaaggttcatccatccattcattcaacaaatatttcagtgtctgttacacgtcaagcactgtttcaggtgccagagaggtaagagtgcacaaaacagaagaacatccctgcccctaagcagcttataatatagcgcattcttgggggcagagagggccagacggtaaacaagtaaatttagaatattggtgaaatacatataaatatatataacactgaaaagtacgatgcagaaaaataaagcaaggtaagggaagtgcgtgttgttggagtggtgacattttagcagggatctgaggaaagtgaaggagtaagctgtggcagatatctggaggaaaagaactataggttgtggggacagtgattttcaatgccttgaggcagggcattcttggtgtgttcagggaaggacaaggggatcaatgcagttgaagctaagtatgagaagtgaggctgggcatggtggcgcacacctgtaatcccagcactttgggtggatcacttgaggtcaggagtttgagaccagcctgggtgtgtgcctttagtcccaggtacttgggaagctgaggcaggagaatcacttgaacccaggatgtggaggttgcaatgagccgagatcgcaccactgcactccagcctgggtgacagagtgagactctgtctcaaaaaaaaaaaaagaagtgagaagaaggaaaggtcagaggtcagagaggtagtcagggcccagatcatgtaaggccgtggagcccattataagaactttgacttttattgtgagtgaggtgggaaaatattggtgcattttaaacagagaagggacatgacttgagtttttgttttgttgtttttaacttgaggaagacattaaagagggacaaagatgaagtcagggagaccagcttagaggctactgcagcaatccggataagacaggacagtggcttgggccaccgttaaagtaaagtagttggattctagaatatatttagaagataggatttgttcatgaattttatgtagaaagaaatggaggctttcttccatatttaaagatctgggtggactggccaggattcccctatctatccattgccacatttgaatctaactgttactttttcacttccataggaaaatgaaacaaaactctccttttttgaacatctcactgttgggctttgttgcctctgcctttcttagtcttctttgtctcttgttcttcgcttcaatcccacatgccttagagactttgacgtttctccatcgttactcctgctgttgctctgggagacttccacgtcccttcaaatgccgacttgtgagcggccttaaagttccttgtgtgactcaactgtgataacctttacagcactgtaaaggtctctggctgttcagctctcttatacctccttctcttcactctctcagagactataattttgccttggtgtctgaattttttatttatcctacttccatatttacctggcaaagccctaattccaaattaatcctacagtaatcctctgcacggatacccaggtagtgtctgaattttttatttatcctacttccatatttacctggtaaagccctaattccaaattaatcctacagtaatcctctgcagggatacccaggtagctgaacagtgtggtggaaaactgggtaaaatggtaaatggatcagttcatggtttccagtcttgtctcaatcctgaccagcattacttaagtctttcactcagtgactctcaatcttggctgcatattagaatcatctgggaacttaaaaaaatcctggagcccaggctacagagaccagttaaatctgaaatttggaggcaggacccaagcatcagtagttactcatgttctttaggtgattctaatgtgcaactaagattgagaaccactactttaaacttgttcttgaaggattttcagtttccatttccctgaaaagctattctattctttcactaatctctaaaaaaccctctacctaactccgttttataaacccttggcaattgatcccacttcctacttgctagaaaaattgaagcatctattggtgaatcctctttaatttttagtccccatttagtcaactatacatttaattagggcttagataagccaggcactgtggtaggcatgggacatagagtggtaaatgggacagttatagtccgtgccttcctggtgcttatggtctatccctgcatccaggcaggtcaattaggcaattactggacatggtacatgctatgggcgcatgtaggaagggccctaatccagacttaggctctggagaaggcttcctcccctttactaactcatctatttcacgcccttctttcccgttttccttctcggaggaggtatcacccttgctccagtggagggagaatgctgccttgcagggcttctgaccatccccctcattttctcctctagaccttcatgggttgttccttcttgtttctctctattacttcatcccctcactgtaaaaatactccaacagttatcaccttaagactaataaagcttgattttgcctctccttcttctcttctagacttcaccaccaggcttcgtgaacaagacctgttcaatgcctgctattaatcacctgcctttgcattttggcttcagccttatcattgcttaatttcttcttccttccagtcacagaggcttccaggttggctgaatttgctgaagaccattccactctatgcactgaacctctctgatgcatttgaccctattcatccctgcctccctcttcagaatttttcccacttttgttttcatgatcctgcacgtactgagttctcctcatgtctttttgactctttctttttttgtctcctttgtgagattccatcttttggccttccccttaagtgatggtattctccaggcgtttgtctttagaccactattgttctcatgcatctattactgtggttttcatcaccaactagatgtgaagttccaaaagctgtatccttagccttgaccttcctcccaagtgcctgctaaacatctccacctgaatgtcccctgggcttgtcacattgggatttactttaccaaactatctctgcccttgttcaggcctataatgatttctcattgggatgatggaattaaaccccactcggtcttcttgctcttaggctcacccatcacattcatcctttgcatagctgatttgcctatagctaaagcttgcactaaggggattcttctggtacaggcttggggttttcagtgggtagcactctggtgacctgtgtggttgagctcttttacatatcgagcttatgaataatatttcaccttttcagcgcttcctattgcctatgcagtgtctttcacactcttcctcatttgcactcctttctcagtgcatttgactatcctacaaccccaaagtacccaattcctactgttcaccaagaaatagctcagtctcacatctttcacaaagccttcttatcattcacaccttcatttatttattcactgatatttattagacatttgcattgttgcattgtcccaggcagcaaacaacattcccaaaaggaggaaggtaagaacacacctgaaggcattagagaagtgcttctcaaactatctgtggtaatagaccaactgggtttttaatttgtttttttctttttttccctatcgtggatcagtaaatggtcctattgcacatagtgaatatgcaggttgcaccacatgtgactcacctcacaaattcagcaacacttgaactggtctatgccttgttcaacaagcatcacatacttggatgtcacagcaatgtcaaattgctataaacatttctaaatgcttacacttgatttctggagttagctggtaccaatctagtaagaaaccatttgtgcgtcagcaccagtcacaggccactgtcctagagtgtttgctatagatgccatggtagaagaggggacagcttatgtcaggggctcagaagagactggacagtttgcctgggtggtttagctgtaaggggaacagaaagcatgttagaggaaggcagaattatgaaaagtgagctaggcttcccagccagccgaacaaggatttttagtcatgaagagaaactggagcatagatagagggggaaggaggagcacttgggcttgctgagttggaggatagaggggacatagtggaaaaggttgctgttaggcaagagatgaagctagagagtcacgtggggttgagatcattcgttcagcgaatactgtttggaagtcaaccatgtgccagaccctgcctaggaattggggttagaagtccagcagggacagttttgctctgctagagattagaagggtgctaagcgtcaccacagagttagactttttagtaactgtaggcagactttgaaggattttgaagtagagcatggtgtgactgctttaatccttgggaagatgactctggtggccttgtgtacagtggatggctgttcatttaggaaagttagttgaaaggtgatttcagtaatcttggccacacaaagacggaagtgaactaggcagtaattataattattactcaaatttaccgagaactttgtatagggcttaaagctacagcatactaaaaacagataattcactaggcagacaagagaacatcaacacaagacagacttatcagtagacaaacttattagttcacttccttctgtgtgtggccaagagatgataaagctcaggaagtagcagtcaggggttgaggggaggaagtggagttgaaggaaaggggaagggacttttaggagaaatatcataaagatggcatacaccacaggtcttaaggggtcagtggagtttaaggatggctcacagtttctgatttgtgatcaggttcgtggtccaactcattgggagaacgaataatagaaggggagggtgttggagaagtgagaagtcaagagtctaaagatgtcgtaccagttaggtgcctttctgtgttcctgtagtgctttgtgctaacttcttgcatagaattgtccattgggctgaagtacttatgagctccttgagaatgtgtacccatttttctatcccagacactggtcacagggcctggcatgtggaacaggcttgacaaatggttcttaaactaaaccgaaagatagtgtattagttttctattgctgccataacaaaccaccacagactttttaagttcattgaaataacacaaatgtattatctcacagttctgtaggtcagaattccaggttggcacagctggtttttctgctctgtgtttcacaaggcccaattaaggtgttggtcaattgggctcttattaggaggctccatttggagctccaatgggagcttggaatccatttctaagctcattcaggttgttggcaggatttactttttttgtggctgtaggacagaggttcctgtttccaggctgtctgtcagaggccacccttaccttctaggaacctctccccagtccttgaatgtgggccagtccatcccagagccagcaaagttgcactgaatattcatgcttcaaatcctccttcttccagccagagacagttctctacttttaaggatgcatttgattacatcgggcccaacatgatattccagggtaaatccctattttaaggtctatacatttaattacatctgtggaaacccttttggacatattaggcgcggaggggagagcatcattttgtctactacaatagtaattatccaccaagtcaggtaggcattatgatcgtggttttttttgttttgttttgtttttctctcgagacagagtctcactgtcacccaagctggagtgcggtggctcgatcttggctcactgcaacctccacctcccaggttcaaatgattctcgtgcctcagcctcctgagtaggcaggattacaggcgcccgcctgccaccacgccgagctaatttttgtatatttagtagggacggggtttcaccatgttggccaggctggtctcaaactcctgacctcaggtgatccacccacctcggcctccctaagtgctgggattacaggcatgagccaccgttcccagcctatgatcgtggttcttaaacacttatgcattctagcacctctcatttgtacagggaagcaaaaggagactgaatttgcccagtgtcagatgggaatgggaaccgagatagatcacgacccttcaacttcactctttcttctaaccgtcagtacattgtccatctcatccatctgtctatccacctatcccatctattcaactagtagtaattcattcattaattcataaacatttgagtagctgcttttttaaaagagtctatgctaggttgggaaatgaggaagaaagtgagatacaaagataacacctgatttctgtcagttcatttttagtatattgaggtctatatcaagctctgctctcctctcctctcctctcctctcctctcctctcctctcccctcccctcccctcccctcccctcccctcccctcccctcccctcccctcccctcccctcccctcccctcccctcccctctcctcttctcttctttttctttctccctgttgcccaggctggagtgcagtggcacaatatctcatcccactgcaacctccacctctcaggttcaaaatgattctcctgtctcagcctcccgagtagctgggattacaggtgcccaccaccatgcccagctaatttttttgtatttttagtagagacggggtttcaccatgttggccaggctggtctcgaattcctgacctcgtgatccacccgcctcagcctcccaaagtgctgggattacaggcgtgagccaccatgcccagcctcaagttttcttaaatccatgctgtctactgataggtttgtcttgtgttgatgttttcttctctgtgtagcgaattatctgtttttagtaagctatagcttcaagccccgtaccaagttctcagtaaatgtgagtaattattataattactgtttagtttacttccttctatgtatggccataaaatttaggaaccattactacatgtatcttatcattgctttcatttttaactttattcaagtaaccagtgttacagttgcttattactctttccagagatttgcgcacatacaaggaagtatttgtcttgtgtgatttttagtgattattccatagcagcataggtaaagctatttcattcctttattcttttaataacttttttttttttttttttttttttctgagatggaacctcactctgttgcccagtctggagcacagtggtgcaatcttgactcacttccacttccgcctcccgggttcaagcaattctactgcctcagcctccagaatagctgggattataggcgcccgccaccacacccagctaatttctatatttttagtacagacagggtttcatcatgttggccaggctggtctcgaactcctgacctcaagtgatccacctgcctcggcctcccaaagtgccaggattccagatgtgagccatcacacctggccctttttataactttattctttttttaaggcatagcattccattgttcaaatataccagtttttttaaacaagtctcatattggtggacatttggattgtttccacttcttttgctattaaaagattgctacaataaaaaaatctcctgtgtgtatctttcatgcaagtatatatatatatatatatacacacacacacacacacatatatatacacacacacatatatatggtgtgtatatatatggtatatatatggtgtgtgtgtttatatatggtatatatatggtgtgtgtgtatatatatggtatatacatatgtgtatatatatggtgtgtgtatatatatggtgtgtgtgtatatatgtgtatatatgtatatatatacttaatatatatactaatatacatatatacaaatataaactaatatatatactaatatatatacatatatatatacacatatatatacacacacacaccatttgttttatagttgatattgccaaatcactcccatagaggttgtaccagttcacattcccatcagcaatgtctgagagtgcctgtttctccagactttgactaacaaagtgtgttatcagactttatggtcttggccaatctgataagtaaaatgatatttcactctaatttaaatttgtacttgtcacattgttgagtaacattggacatctttttgaatacattttagagctatttgtatttccttttctgtaaaccctctgttttttgtatctttttttcatttctctgctgagaaattttttttttttaatttgttgaaagcctttatatattagagaaagtaaccttttgggatatgagatacttatgttttcctttcagtttcatttctcttttgattttgtgtgcttaagcttttcactgtataaatatttaaagtggtcatatttaatctttacatctgtgacttctatgttttgtgtcattgttggaaaatcctgcctcattccagtattataaaataattagctcaggtttaccaattatttaacttttaattttgaaataattatagattcgcaaaaagttgcaacattactacagagagatctgtgtaattttcattcagttttccccaaacaccgggtatttttataatttcatttttacatttgaattttgtatttatctgaaatttgttttaatatgagatatggatttcaattaattttttttccagttggctacccattgatcctcacataatttgttgaataatctgtattttccccaataatttaaaatgcatgtgtatctactatgaactaattcctgcatctactggttaatttcttaaatatttaaagtatcaactggaagagaagctgccatggcattatcattgtacatttttccaagggccacatgttgaaataaccagtgctgactttgtgtcaaaaatccatttatagtgtaatttggcctatttggctagaactgtgtggtattgtgggttgtggtggggtataggtaaataacatttattctttgccctccaggagttcaccttgtcttattgatcccaatctattcaggtaaagtctttagactatgtagtgcttatgggtaaccaattaatcctccctatactcttttttttttttttgagatggagtctcgctctgttgctcaggctggagtgcagtgatgcaatctcggctcactgcaacttccgcctcctctgaatcctggtagcaattctcctatctcaacctgagtagctgggactacaggggccgccaccatgcccggctaatttttgtacttttagtagagatggggattcatcatgttggccaggctggtctcaaactcttgacctcaagtgatccagctgccttggcctcccaaagtgctgggattataggcatgagccaccacacctggcccttcccaaaactcttctaaatgacatatattatctccattttgtaggtaatagagactcaaggattaaagttgttccgatatccagtcacagcaagttggcagagctcaagcccaggttctggtcttttgattactagcgttattccacaccattccaggacatgcctcagatctgcctgagacgtcttttcactccattgacctcagataaaaactgccataacttgtgagctacatcataactctactattccatcttggctttagcaaacctaaagactttcaccatttttattttatttttaaaataaatattaaacaccatggtgaaaccccatctctactaaaaagaaatagaaaaattagccaggcatggtggcgcaaacctgcaatcccagctatttttgaagctgaggcaggagaattgcttgagtccgggaggcagaggttgcagtgagctgagatcgtgccattgcattccagcctgggtaacagaacgagactctgtctcaaaaaaaaataaataaattttatttatttataaaataaataaattttattgcgtgtatttgagatttacaatgtgatgttcatgtttacttcctactttttaatgaaagggttaagcaaaggtagataacttctgcaaggtttttctgatttcactctgagtgatgctaaaggaaaatgaaatactcatctgcttatttcattacctgagtgtaagtagtagatttagtgtatatttaggttatttagatttaggtaatcctaaaattctttccaagctgtgattcttgctagtattttccatagttttatgttcccatataggaggaagtgaacaaaaacatttaaagaatgataagtattttcatgtgggttatttagagggaaaacatgctacaaattccttaatccaattaaaatcacacttgttacagaaagtaatgtggaccgattattgtataatagtagtattgatttcagttcattatgcattagcttggtagcatatgtttaaaggctaccacttaaaattctgtatatgctttgaatttaagactatcagctcatatgctttgttagggtcctcttatagtttcctggcaattagctgcaatgtagttcatgtgatgtttttcatgggatagggattttaggagcagtaaatggggatggggtggaggtgagtctccagccctgtattttctgcttaccattcacaattaagcccagcatagggcttagtgtggtgttaataaatgttggttgattgatgaaattcatttcaccatcttgttcttcttactgcccttcacactgggaagctgtgtgctatcatgacgagcatagactggaaccctgaactttgaacacttcctctacagcttagtaactgtgtgatctggggcaagttccttaacttctctgagcttcagtttccttatctgtagaataaagataatggtatttctctgataagagctgctaggaagattgaatgtgataatgtcagtggaatacctagcacagtacatgacccagaaccttcagttagtgggcgttattgttattctcttggataacttgggtagcaactcactatactcccttgcctcaagaagtagagacaatagttggtttcaggggatgtgcctagttgtactgcttgtggtatgctgggtcagatccctttgtttcaagaaaactctgcaatctcctcacagaatctgttaacacctctttgacttttgagcaatactccaagatgactactgaggctggatgagaaggctgattgtcatctgtggttctgcttcttccttatgcatttttgacccatttcacagatttcataataactcattatgaaaattttattcttttcagaaccaccgatttttaaaactttaatcaagacagctttctttttgcaaaagatttcaataatgaggattccaggttggcacaggctgatttgggcaactgagaaaagtctttccgacctttgtcagagaagtagcttagctgagttcgttcttgttgccaccttgcttttgaatctcttggttaatgtatgaaagcagaggaactgctttcatctgaggcacacagtggcaaagttcccatggcaggaaatgtttgttcttacaaatctcatacatggtggtcacaagggagaccttcgtattttgttttgcttgtctgggctttatcataatttgatgattgtttcagtgtgtttgcctgacagctaactatctaagagaaaagactgtgatgcacttgcccttagggaccttcttagtcagccccaatctacctgtcgagtttatctcctgcttcccctctttgcaaatcctttttgtactacaaccaggctagtggtcttttaacaagtgttctctgaagtaacaatccctgtttctgttaactgaaaaaaaaaaattgatataaacaaaaacaaagagttgatgacttctgagattgggagggaggaatgggggcaggtgagaaataacttactaaagggaaatagagatttttacattggagggcagtagggagtgttgaatgagaagagtggagtcagatagtggagctgagaacttgggacttgatgtaatttagaatagggaaaggggaaaaggtgatgaaagtggtattttaggactatatttttctcttaataagattaaccctaagcgtagatttaagggatatatgagtagaggcaagagttatccaggcccagttatagtaatacacgtgtcaaccgaagttctggttgttagcagtgagaattgtggggaacattttcatttgagaaaagtcaggttgtaacagctcacaggttggaggtaaaagagcacagtcaaagatgattctaatggcttggagtaaaagaaaagtcaagccattaacgcctgtgaaggtgacggatcaataaacctgttggttgaagatagaagctgggcaagatgagttccttttgggattagttaggcttcctgtgatggtggaatatccaaattataatgtttattggcagttggagaaaatggactctggcatggatgaaaggttagggttcagagtgtagacttaggagtcattaccattgttttaggaacaagtagatagaaagcaaagagagcaccaaggattgaagggagaaatccttcagtgcaggggtatgaagaaaataaccagctaaacaaaacaagcaagagctgaatgatggaaaggcttgaggccagtgagatgaatgctatactgtggaagccaaggtcagggctgtgagaaggaaggagaggtcaacaatgagggactgcaggcagatcagagtagacaaaaacttaggataagcctttaggtttagcaagagggaggttctcaacctttgtgtacaattccagtgagagaggaaacctttaaccaagcaagatgattatctgagaagagtcacaccttccatgaggaatacctttagagatgctgtgatccagaatccctgccatgctaaatcacagtctgtcatatctactcaagaacaattcctttcccttattccattatcatatgcctattctttttttttccaattaaattttgcagcttgtcctctccagcctagagagggcttgtcactattgttattgaacaacataggtcacaaccagttaaatttttttctattccaacacattttctgatgaaaattaaatatataccaagcaataaatttggttctctattgtcaaacttaacagcaagaaactctttgttacattgtactatttcattttctctcaagataacattttattctttatatttccttttctttatttaattaatttatttattttgagagataggatcttgttatgttgcctaggctgcagtgcagtggcacaatcattgctcactgtaacctcaaactactgggcttcagtggtcctcttgcctcagtctcctgagtagctgggacaacaggtgtgtgccatcatgcccagttaattttttaaaaacaattttgtagagatgaggtctccctgtgttgtccaggctggtttcaaactcctggcctcaagcaatcctcctgccttggcctcctaaattgctgaggttaaaggtctgagtgactgtacctggaattatatttctcatttatgtttttttctataatttatcttagattaagattgagattaggtgtcttaccctttatgttgctataagagaatactaaagaatgggtcatgtataagaaaaaaattatttcttacagttctggaggctggaagtccaaggccaaggggctacatctggtgagggccttcttgctggtggtgctctctacaaagtcctgaggtggtacagggcatcacatggtgagggggctcatgagagttggctagactggcttttataacagactcactctcctggtaaataactcactccctcaataacccgttaatccatacatccatgaagacaaaggttgatggcctttgtgtgagttatacaggccccagtttttcagcttctaatcttttattcttggtatgtcattatttatttatttttatttttaccttttccatttcccctttcaggaatatgtcattatttattagtctaacaaaatgtagtgggaaagaggaagacaccttctacttatcagaaaataagtcagatggactacttgcaaaagacactgaagccaataaagagaaacacttagaatgcccagtatgctaatgactatactatcttctatgctatatatagtagtatatatatagtatgtgcataaacacacacatactatatactggttttttccttctaggtatgaatgttcatagttcaaatgaataaaatgcagctaatttgcaaagttttttttaaaaaaagtacaactgaccttaatgaaaacacattcctcaagtttttgagaatcaaatctcagtaaagaagatcttttgagaagataaatacagcctctcagtaaagggcagaagcacaaatagaatacagttagacaacagaaagttgagaggttgacctggtcatgtgaattatttacagataaatataccttatttacttactcttctaagttaaaattgaaactgagaaaattgggccttcttactgcccagtacagctatgagaatttctttactgattgacgaatgccatggatatttagtccttgactcacctcccctgggtcggtactgtgcacaatacaaatttgcttaagaagcccttccaccctaccctacaagaacttacaaaattctaggtgaggtaaaacatatccacaaatgaaatgcagtataatgactcccaaatatagaggtatgtgcaggagttagaaccaaaatattaataactagtgtggcatggatgtccaatgaatcagatcagatgccagccctgaaaaactgacctgcctgtcctaaagcacaagagtggaatatcagtactggttacatataatgtgctgtaggattgcatatttgtataatttagtaattgattccacagaataatcatgtataggtaatgggcaaatctatcatcagttttgaataaaataatgtttctaacatgaattctctgtagaagctttttaagcagaaatttagataagcagtgggcttagaaaaatccacatgaaaagcctttaataaatgaatgaattcatcatctccctttcccttcagtatgtgattccagtgtccatgtcctcacccatgaatgggaaatgaaggtgtgtgttaagtattgaaatatagcaggaggaggatcctaggggtactgccttaaactgggccaacctgcttttttagttcttctgcccacaaatgttttccttcatactataagaaatgctccattttcttaagtacctaaaacattcaaagattcatttgtgttaacaagcctcaagtgaagttccactggccacaaatgcaaagcaggcaggcaagataaagtttgttttttctcactgagcgatagtttgagggctgataatttgtttatagtcattttttcctgtagcccaaggacatggaaagtgaaaaaaagaagaattcaggaacctgagttgtagagttcaatattcataccaagattcattccacctcataggttgcatcccattccctttaaggcatttttatctgttcaccagtgtatggagtttccataatcagaatcaaccctgttgttccattcaccacctggagaaaaaaaaattaggattgttagtctgtttgcttctcctccaatgtgaggctatggtttctctattttcctactttttttctgatttcctgtgaaatcaaagcttttgccttaggcatatacataaacactcatgcaatttcagcttctcctcttccaccaacttttcttggccttacaaatgtattcaagatgtttttgtccttgaaataaatctgtccttcactctactatcttctttcttcctcctataaataagtatcttgagtaactgggtcatagaaagggagtgatcccagaagtcagttgagctgagtgttgggtccaactctttattggaaaatccttcagaacctcagtcgtcacagctagacaagctctagaagtccttccattcaaaccttcctctgggataaatttatatttatcaagactagctactttcaatgcctcctcactccttggggcctgggtttgatttctgccacccaactgtgtattatactgtagaagtttataaatttagctagtttcaaaattcagtaggttttttcttcatccatattcactcaacactggagaactagttttcttccttagattcttcgacataccaataccagttgtcatcttaacattctttttctttctttcatttttaaacattttaaaatagagttgtcagacatacacagaggtagatattaacacccatgtactatcatcaaccattctcaaaaattgtcaacattttaccagtctcttaatattattttttaaagaaaaaaccattttgttctcataacatttccatcaccctccagaattgtcttgtgctgcactttgtaatgaactcccctccatcctccaaccccagcaacttctgacatgttctccaactttatagtttagctttctccagaatttcatagatgaattttatagtatgtattctttggagtctggcttatttcacttaacagaaatacagttcagattcatccatgttgtatcagcagcctttttctttttattgctgagtagtaattcattgaatggatataccactgtttgtttatccatttattagtcaaagaaaatttcagttgtttattattttgggtgactatgaataaagtcactataaacattcatgtacaagttttggaatgaatataagtatttctttgtcttgggttaatattaagagtaaaattgctgggtcatatgctaagtatatgggattttaataggaattgtgttgaccaatttaagagaattgatatcttaacaatattaagttttccaaaccatgaacatggtatcacttaccatttatttaggttttctttgatttctttaatttgatttttctgcatagatgcataagaattttttcttattctttgagttcatcaatttaaccaggatttgtcttgctattgattgttatgcatcagattatcttacaaccttgttttctcagtctgtctataaagtcagtaggaaattattttttgtcatgtatttgaatatgttactttttcttttgttgaatcgtgtactttagaaagaccaattacccttttatgggatcatctttgcccttcttttttttttctattagtttaacctttatcattttcatttgaacacttcaggttttcttctatacctagaaatcactgtttggttgtgaatactctgtttctggctgtttctgatttatcttttagtgtgctaatgagctttggtcctcaatttgtttcattggtcctacagtctcccattccattttattctttttttttttttttttttttttttttttgagacggagtctcacgcccaggctggagtgcagtggcatgatctcggctcactgcagcctctgcctcccgggttcacaccatgctcctgccacagcctcccaagtagctgggactacaggtgcccaccaccatgcccggctaactttttgtatttttagtagagacggggtttcaccatgttagccagggtggtctcgatctcctgaccttgtgatccacctgcctcggcctcccaaagtgctgggattacaggcgtgaaccaccgcgcccggccccattttattcttttatcattttatgaatacatgtttttaactcaaaacccttctggagaatttccttttgttcctttagttaccttttgttgttctgggttcttttttgtctgctgtgtcctttttgctttggtttctttccccccacagtttatttgtaaagttttctagtgattttttttttttcatcaaatgaatattagggcacttctggtcagaccacatacttggtctgatacagtttgggtgctttgctgtctctttccctcagtgtttttgagccagtttgttttttctcactgagcaatagtttgagggctgataatttcagtttatagtcattttttcctgtagcccaaggacatggaaagtgaaaaaaagaagaattcaggaacctgagttgtagtgttcaatattcatagcaagattcattccacctcataggttgcatcccattccctttaaggcatttttatctgttcaccagtgtatggagtttccataatcagaatcaatcctgttgtaccattcaccacctggagaaaaaaaaaacaaaattaggattgttagtctgtttgcttctcctccgatgtgaggttacttgtgaggcttctcaggctcttttgcatccccagtgcagctgggggaagaggccatgttgggttaggaaccctgccgtgttgtagatgccactctgctcccgaccctttcctgggccacagcgttttgcaatttagaacatttgtatgtagcccttccttatttggttgcctctgtgaaattctgtgggcagtttttcttttgaccatttatttttcttttttctgtatttgcagctgctaccaataccaaagtagaagctcccttctgcagctctctgacttgcttctttatgtttgtccctggattctctttctatttccccagcatgggtgttccctgaggggctgcctccctgtgaacataaagatggcagttcacaagccaaggagagagaccgcaaacagttccttcagccctcagaaagaaccaaccctaccaacacttgattttagacttctagcatccagaactgtgagacaataaatttctgttactctttttttttcatcatttctttttctttttttgcagtatttgaagctcctaccaggcagcttccttctgcacctttctggctgttgcttctttaaatttgtctcagctgctcttcctgattcctaaacatgggtgtcccctgagtgctgccctttgccatgtctccttctatattatttctcacagagatttagtctgctcccatgacaatgattgcctctttttataggtaaccctggctttaatcctgggctccaattctggatttttcttcaagttgagtgaacatcttcactttggtgtattagtttgctacagctgctgtaataaagtgccataaactaggtagtttaagcaacagatatttattacctcatggttctgaagatgagaaatctgaaatccaagtgttgttagggttggttctctctgagggctttgaggaaaggatctgttcaggcctctcccttggcttataggtgggtgctcttcctgtgtgcatgtctgtgtctaaatttcccctttttataaagaccccagtcatagtggattagggaccacctaatgacctcattataatttgatgacttctggaaagactctttctccaaataaggtcacatcctgaagaactggaggttaggactttaacatacaatgttgggaagacacagttcaatccataacacttggatatttactcatatcacacatgtttcctgctacatgccaggcgttggtctaggccctgggaatatggacataatgaggctcagtctctttcctcttcatgagtagaaaagataagaatagatttgcaatactatatacaggaagtgatcccatagatgagagattcttttgaggataccttagtggcacacctagccctgactggctgaatcaagaatgacatttcagaggaagtgatgcttatgctggatccttcccagtaggatgcaatactggcttatgctggatccttcccaatagatgcaatagtgtgtaattgctctccctgcttttaaaccacacccttagttacccagccctggattccaccacccagacaatcttttcaaagcaccacattgattaagacatttctcagttgagaaacctgtaatgactcctcatggtcaacagaactaactctaaaaaaattatttagcctggctggcctttggttcctccagaatcaggtgccaccactgtaatctacctttcctgtcttgatcttcctattgtttccatccttagccctgtatgttaccaagttgtagtaacaaacattttggagacacatctgcaacttttcataatctcatgaagccaggatttttgttttgtttcctactgtatcattgtcacctaaaaaagtgtttggcctataacatatacttcagaatattggttgaataagcgaatgaattttctctacttgcagtgcaggcctctcctttctctcagctgtgcacatttttgccctgttgaaattttattcccagggctcagctcatgtacactttcctccattatgcctttcttctaggtcacatgtggatacagatgtgactcttcattcctaaagacttttgcagtctgtgtgaactgtttgcatgcccctgcattctgcttcgcattgtagaaatctgagtaggtgccttttacctgccagattcagttgtttgaatttaggaaccatattttaaaaataatattgtgtcttgcttagcactttcttgcacaataatagatgcctaaaagttaatttgtgtttgaggagaaaatgaatgagaggagtattttgtatttgtttcaaaaaagtggggaagaaggcctaagaaatggagcatttggtctgtccctcttgctttcccttatttttctgagtttacaacatctttaaattcattcagcagatatttcttaagcacttgttctattcgagactaggactattgaagtcctagcacttaaattacaaacaagaattaaactgcctttggggtacttatcacttcttctgatagagagacttcccagttggtcccagtggtcactatcatctgtacagtttttaagatgcttttcttaatactcacatttattcatcccagagtctagactctttgcacatgttgaggctgcctgagagtagggcccttgtctttatcctcccattccgcactgcctagcactgagcttatacgtgatggcaacttcagtgggtcctttatttcccctaaagattctctgactcttttctaagtttgccctgtctctccaattatagaatgatgagttaggaccagagactccagaaggatactgattgctctgcttagattcagaggccctctattatcaataagagtaaaaataagcgcaattaagtagcacaatgtttagcactcgtgctaaggtttttacgtgaattgtattttctactggggcctgttgctatatcattggcttctaggactccttcatttcttacaagttgtcacgttaacatgttgaggttggtgagtgaacatctagtttgtttgcctctgctcaaactcaagagtcatgattatactgaagagcttgtgccaaacagaaatggaatctgaattactttggtgggtcatgcacatatattatcttttctagaggcatttaagtcttaatccctttatgaagggaaaatgaggaagtgaaaattgagatgaaataatggagtagtagggagtggaaaggatggtaaaaatacttgttttgaggttctgtttgacgtggaaatgactactcttaaacttgattgaaagacagacctgagttaattcatatagaaaatgtggtaatatgttctattatgtcattgttattgggggatgggaaacatctattttatttaaatatgttgtatacccatcagaacaacatgagttcatggaagtgatataacaacaattacaagtagtagcccaaccctatgctgtctgtgtttaggtttatagtgtgttatgggtatcagagagacaatggcacaagatacttctaaatagcaggtatgtaattcactaacaagtcttatatggtgttgcaaagtatgtttatcaggcatacttaacatattcacttattaatcatgctttgtttaaacgaaaatcaagattagtttatcctgagcacctatcagcaggaaaggtagagatcacttggataggctcaggctgtcagcttcagtttatacttgaaatgacactgcagagtaatctctgtgtcatggctacagccaacattgtctctcaaccttccttcttccatgtgagctacccactcttcttccttattctgggattctcctttctccctgaggtcatgtgcttccccttgtgacttgtgggatgggatggaatggtaaatataatgtagattaaccaaggaatcactgcagtcccagtgttgttgttgttgctgttttcagtgcgtggtttaaatgttggcatgtgatgcaattctgggaagggacatttaagggcctctggaggaggattgagaaggattttgaagctcccaaaaagagacacaaagaagttccctttcactgctctaaataaaggtgtatgagaatgtgctatttggaagggttgctactgtctttttccgtaaaaatgacaaaagagaattttgccaactcaggagaactgccatatctttggacttcttatactatgagaaaacacatccccttactggttaagccattatgagttttctgttacttgcaaatgaaagcatcttccctgattctgtaacattgccatttgaaaaatagaaagttaggtgtttagtatctttgacatttcttcatcaattttgtttgcctaaatgacaaggcttatggtctaattttctgtaatttactaagatataagatatagtagtgattttctctttcacagatacttaggaacttcaagcagtcgtcccagatataaaaggttagtttacatcctggatatatgtgctgattcaaagatctgtccccatatttcacatctcttgtgagttcttttgaaatcctagattaatcttttccagcattgattgcacctcctattcctgcccttcttgacccagatgccttatcgttcctgagtgaccttctttaactgaatcctttgtcatgtattttatgcctgttgctcatgttgtcatgggtgtcgtcatgtctgagaatgatttatgaagcattaagaaaagattctcaaacctggcccatcagaattttcccaaacattaactgaatccaaatctctccctgggtgattctgattttcaaccaggtttaagaaccactgacataagggatataaaagaaaaattgtactgacccaatcccatacctaaagtaaatggtttcaaatctcacttgacaaactcacaagtctgtattagagtcctccagagggacagaaccaataggatatatgtgtgtgtgtgtgtgtgtatatatatatatatatatatatatatatatatatatatatatatatatatatatatgagagtttattagggagaattggctcacagggcaaagtctcaacaataggccatctgcaagctggagaaagagagagaagctagtagtgtcactcagtccaagttcaaaagcctcaaaactagggaagccaacagtgcagccctcagtctgaggccaaaggcctgagagcccctgagaggccactggtgcaagttcccagagtccaaaggccaaagagcctggaatctgacattcaagggcaggaggagatggagtaagcgtcctgcaagggaagaaagactgaacagactcagcaagctgcttatccttccttctgctcgctttgttctagtttcttcatttttttttctttttttttgagacaggatcttgttctgtcacccaggctggagtgcagtgacacgatcatgactcactgcagccttgacctcccgggctcaagccatcgtcctgccttagcctcctgtatagctgaatccacaggtgtgcgccaccatgcctggctaattttttaatttttttgtagagatggaggctcactttgttgcccatgctggtcttcaactcctgggctcaagtgatccccttgccttggcctcccaaagtgctgggattacggatgtgagccaccacacctggtactctttagggttttctagttgtaagaccctattggctgcaaggagacacattaacttcttcctttctgatttggatgcctttttatttcttttttgcataattgctgtggctagatcctccagtcagcccttcacatctgtgggggattggttacaggaccctgtaccaaaatccgagattcctctagtccaggccaggcatagtggctcatgcctataatctgagcacttcgggaggacaaggtgggaggatcacctgagctcaggagtttgagaccagcccgggcaacatagtaagacacccatctctacaaaaaataaaaaattagccaggcattgtggcatatgcctgtagtcccagctactcgggaggctatagtgggagaatttccttagcccaggagatcaaggctgcagtgagtcatgaccatgccactgcactctagccttggtgacaaaatgagaccctgtctccaaataaatacataaatcggtaaaacatttttaaaaattagaatgcttaatggtgtaatacagttgaccttccataactgaggattccacatccaccaacagtggattgaaaatatgtacaattggccctctgattccatggatgcagaacccatgaatatggagggaagactactatgttgaatagaagtggtgagggcacaacaaagaggtcattcaaacacgcagtgagatggttgctacctgcaagccaagagaagagacttcagaatgagaccttatcttgctggcaccttgatcgtgaacttccagcctctagaactgtgagaaataaatttctattttttaaaacaaacaacaaaaaaagtggtgagagtgggcatccttgtcttgatcttagaggaaaagctttcaactctttactgctgagtattatgttagctttttatatatggccttcattgttttgaggtttcttctaaactgaattcattgagtttttattataaaaggatgctgaattttgtcaaatgctctttttgcatcgattggaatgattatgtggttttggtcttccattttattaatgtggtatatcacatttattgatttgcatttgttgaaccatccttgtatcctagggataaatcccacttgatcatagtgaatgatcctttttatgtgctactgaatttgatttgcttgtattatcttgaggatttttgccagtatgttcatcaagggtattgacctgaagttttctttttttgtagtgtccttgtctggttttggtatctgagtaatgctgaccttatgaaatgagttcaggaagtattccctcctcttcatttttttttcgaagagtttgagaagaatcactattagttatacttttttttttttttttttttttttgagatggagttttgagcccaggctggtgtgcaatagcgtgatctcagctcactgcaacctccgcctcccaggttcaagtgattctcctgcctcagcctcccgagtagctgggattacaggcatgcgccaccatgcccggctaattttgtatttttagtagagacggggtttctccatgttggtcaggctagtctcgaactcctgacctcaggtgatccgcccgcctcagcctcccaaagtgctgggattacaggcatgagccaccacacccggtctattagttattttttaaatgtttggtagaatttaacagtgaagttatcaggtcctggacttttattttatgggaggtttttgattactgacttgatctccttacccttgttggtctgtttagattttctcccgcttcatgatttaatcctggaaggttatatgttctaggagtgtatccatttattctgggatatgtcggtgtatcatttttcacagtagttcttatgatcctttgcatttctgtggtctcagttgcaatgtctcttctttcatttccaattttatttatgaatactcttttttttccttcgtgcagctaaaggtttgtcagttttgttgaactttttagataaccagctcttagttttggtgatctttttattgtttttctagtctttatttcctttatttctactctaatctatattgttttcttgcttctgctgactttgtttttctttttctagtttcttgaagtgtaatgttaattatttatttgaagttttttttcttttctattataggcatttaaacttccctcttagaactgcttttgtggcatcccataagttttggtaagttgtattttcattttcatttgtctcaatatttttaaatttcccttttgatttcttttttgaccatgagttgttcaggtgcatgttgcttactttccatgtatttgtgaattttccagttttcttcctgttattgatttgtagtttcacaccattgtgacaagaaaagatgcttgatatgattttagtcatcttaaatttggtaaaacttgttttgtggctcaatatatcatctgtcatggagaatgttctgtgtacacttaagaagaatgtgtattttgctgttgttggatagaacgttcagcacatgtctgttaagttcatttagtctaacgcgtacttcaagttcaatgtttccttatttattttatgtcttcatgatttatgcaatgttgaaagtaggacattaaagtcccctactattattgtattgtagtctctctctcttttcagatctattaatctttgcattatttttggtgctactatgttgggtacatatgtatttataattgttatattctcttgatgaattgacccctttatcaccatataatgatcttatctcttgtgacagtttttgacttaaagtctatttggcctgatataagaaaataattttttttacagctttatttttatttcaaacttttattccttgaggtggtagaaaactattttagtccactttaatctctaagcacctcccctccaccctcagcaagttaaaaaagcttctgtagtatcaaggtaattgggaggaggagccctttaatcctccatgttctctgtctacattgccatcctttgagatatccagggtcccatcacgtctttgaccacttgtgcttgcagatctgaagagatgtatgttgtttctacttttatgacttcttcattttctatggctcttctgcaatacttccgtaaacccagaaaatctgaaaggtttctcagttaattttgaaactttatttgccaaagttgaggacacgtatctgtgacacagcctcaggaggtcctgacaacatgtgcccaaggtggtcggggcacagcttagttttatacattttagggagacatgagacatcaatcaatgtatgtaagaagtacattggtttggtgtggaaacgcgggacaactcaaagcaaaggcaggaagactcgaagcagggagggggcttccaggtcacaggtaggtgagagacaaagggttgcttgcattcttttgagtttccgattaaccttttcaaaagaggcaatcaggtatgcatttatctcagtgagcagaggataactttgaaaagaattgggggcaggtttgccctaagcagttcccagctgctttttccctttagtgactttgggggcccaagatattttcctttcccatttccatgcctattgggggtgctcagatgtccttgtactgcacttgcaccagactggagcaaaagaaactttcactggctgcctaaagtcccattggccacttgtcccaactctgcccaggcaatagtgcctgacctctcctgctcttgcctcctgttatcctacctggcacttcctcagggcttattacctttctctctgggatctgtactaactcctttcctcggactctccttccctcaagcctgaaggatgcttttctgtgccaggaggcatgggcacctcttgtctctgccctgtgttctgtatggctaagtgcctaagcttttgtaacccaaaagctaagacaaaactttctttgctttctgctgttctcttttacttccaaggcagtgtgaacaacctattcaatggagagaaatggcaaaaagagaatggagggtgatacataaaataccaaggagaaatgtgggttagtatacatgagccatcaaaacaaaacacaaaatcctgtgtaataggtggaatggacatgtatttttgcttctgtaatgtgtgtgtgtatagtatgtatatattgccgcatacacacatgcgtatgtgttataattagcaaatttgaaaatttgtcatttgaaataattttttactgaggctgttccacattctaggtttgcttccttttaattggagttataataagtgacaattccagcagataaactattctgctggaatatatacatctaaatgagtgtttcctcaaaaatattcacttcagactactatatatcttttccactaatattgccatagccccaaacatttcccaagttgtttttggaattgttcttgttttataaaccataagctgaaaatgtccgtagtaaattactttttcattaaacccagctctattccccaccctttcccacttcattgattaaaatacagctccacttgatccatttgcctctaaaccaaccttaacttttgattagttatgaacttgttgtgtagaagcagtaggcaaagatttttcctcctttaaaaccatttaaatgaaattctgaaaaactcaagttgatttttaaagaaaagctcaaaaattgttttgatgactgtatcactcacacaaatgtgtaattgccaaagtgattacgctgaagcaaacttttatttgaatgaatacatgttggtagcttcctttagaacaatagttctcaacttgggaggattttgccccacaggggacgtttggcaatttctggaaatgtttttgatcatctcaactggggacgacttgttcctggcactcgtggatggaagccaagttgtggttctaaacatcctacaataatcaggacacttccccacaactaagaattgtctgcccccaaatatcaatactgtcgaggttgagaaatcctgctttaaacaaataattactttatagtcatcccccatgttttaatatacttcagagctgctggtcactttcctccagcctcacagcctctttgagattttgtttctgctaaagtataaaggatggggacgagagtggggaaccagttccagtgagaaaacagatgaggaaggaaatactaggaaatgtgtggattaatatctaggtggaagtttccctagcaacctttgaattcttactaagaagtttattacttatctcagggatttttcctgccaaagatggtaggagcagagacttggggcctctgattttctagggtcataacccagagagagactgtctatacaatactgttaccgtgcatggatctttgttcttagagctcccaagatggtggcgggctgctcccaagatggcggcaagccttttgttctctgacctggggttcttggcctcacagattccaaggaatggaaccttgggccatgcggtgagtgttacagctcttttagaagccgtgggtcacggaagagaaccgtggaacctagcgactagtgttcagcctggttaggatgaacctgggcacttagccatgcaggaacaatgacgagcctctagcccgattgggagtggcaatgggcgcctcactggatcagaagcacagtggacaccctgccggatccggagggttggaagtcagtggcgagtctccgacatcggcattcagccctggtggatggtgagcgaaagttcagcttgagccagaacaaacacggaccagaagagtgtgcagttgcaagatttaatagagtgaaaacagagctcccatacaatgggagggtacccaaagaggttgccgctccctgctggaatgcctggggtttatatcccaatcattgtccctcccccgtgctctcaggtgatatatatgatttgactatttctttatctcctgcttttagtgttaatttgtattttagtgagccctgtttactacctgattcgttgggtgtgagctgagttacaagccccgtgtttaaaggccggtgcagtcaccttccccagctaggcttaggaattcttagtcggcctaggaagtccagctagtcctgtctctcagtaccttcctctcggggaggctttcaccaccctctgggctgtgatcccactgccccattctgactcacatctggacttccctgtccctatctaatcagtcacagttagctgcctttgcctttttattctccacactgcttttgctcaacagcttctgcatttgaaggcatgttctgatccgttctttattaaggatttattatttctgcggaatagcttgatttgccctgtacccttctcctcccttactctgtacaagggtaaagtttcaaacaccccatcccccatatgaggccagacaaatcttcccataggaaggttagcatttggtttttaccctgcagtccccagttccaccacagagctccatccctatgttggtaccttcctgcagttcatttcagtgtgtggtcccttgagcagcatctgtggctagccagttctgttcttccaggtttgtccctgatatctgattcctaaagcagagatcagtggggaggccagaacctcccaaacatcaaaagagaaagagaaaaccatatagctgtgttcctggattaaaggtatgccctagaaagccatgtgctggttctaccactcctttccctcaggtacagtgtctccaatgtctgttgcagaattagaataaatctctacatttgaaagtctacctggaaatggttggccatgatttctgggctcttgtctggtgcttcccactgcaagcacatctgaggtcccatcctcatctgagtgaattccaaccagatgctctcccagagttctgccttctgatcactgttgagatagacttgggcaaaaaggacaaagtgaccaggtgcccaggcacactgtgtatgttctggtattaggtctacatcatgctaacgtaggcagcttgtggctctgaatagtctccaggtaggttgccctatgggaagggatttctgctctacgaagaaggcgcatttctcatgtttgaacctgacatctttaatttgggtctaaagaggcaaattaagtcacttcgttaccaaatgaccgagttgtcatgtgatactatcaaaatcaaggagcagtattcatggggcagttgcagacgtggggcaatgaaacaccagcaccagtactcatgagtgagctcctgtttactctactcctgccatacatttttcaggcctttggaggcaggctgagctctgactgtgagccttagctattcctctgaagtatctctcttgtttcttccacccttaatggaggggtggtgatttttctactgccttataatctaaggtagctccaaattctgggccactgctttcttgtgattaccttcttctcaacctctcaatgtcttcattgctgagctctgatctctaacaactgctaaaaatatagtcaggtagtgttatggtacaatacttctttttttagtgtactttcttctttttcaccatcatgggccccaggacttggatattgtatgcagctggcacctctttattgtagtcttacaagtagatcatttcagacaagtcctctgagagtcctcccagaaaaatgacaaggatctcttgcttctgtcctctgctgctcactttgtaggaggtccacatccccttagcagcaggataagacattacccttgcttagagttttaagtctctgcttcatttcttgggtatcaggagtctgtcagattaaagttcttgaactttaatgtttccagggctctgtgtatgctacccccaaacccaaatctagttcctctacttgattttactttaagcagcaacatgtcatcctgatatttggtgcctgctagcttagggcagtgttgagctagcgctttgaagatgctgcagttcagtctcatgagcccatttttctccccatggcttccaggtctgggcaaaaaaaactgtagcagtattatcctatttatgaattaccactcttcctttgagaaattgcatgttcatgttacccaaatatgagatgagtttctgaacctctgtggcataacaccaacctctttaactactgcattgagaggtacagtgggtgcttgtccaaaaacaatctgaacaccaaagcttcctgtgacccatcttgaagggcctcccactcctcaaactcttgatagtatctcttcagtcttctcataatagctcaagcagttaaccaactccctgctccagctctctgctccatgaaaagtttgtgtggaccatgttgagactatggggcacctccactaaacttaggccagccatggtcagacctcggatgaggcagggatgcatcaaggggataggtttgtagatcatttttagtcttctctatccagttctcttgtgctcaatagtctggtgagcttcattcatacaagagccttgatttttaagccatcaccaggtctgaacttctttgccatcagatattctaaattgtcttttcgggtcctggttctgctgttaactaaaggatatctctaccacctatacacctataccacatggagtaaattgctccctccaattttttttagagatggggtcttgctgtgttgcccaggctcaagcagttctcccacctcagcctctcgtgtagctggaactacaggcacatgccaccatgccaggcttgcctcctatctttatgtgcccattgtctagcaatcaagtgcccatgatgagtcatggtaaaagaaggcaaagatatgtctgggtctagtctaggggtatcattatacttgcaatataattcagttgttaacagttttctaaaccagtcagtccctacaatgtaacattggcatccagtccatcactctcagctcataaggaaattctcagtagtttgtgttcagttccaacaaggtaagggggatcaggtttttctgttgtgtcccatccctgtgcaattgtggatgttccttctcttctggtgggcccacaaatagtaaagactatggacaggacaacagattatctacaagcagtggattagtgagagaggagtccacactccaaaaagctatggttactggatctttttcataactctgtagtccttcatctcctgctggctttgatgacatctactcctgcctcatctagtttgggttcttcctctgcctttcctccttccttcgtctcagtcttgtatagtttttgggattggagaaaccagctttcttggctgcctgtgaatatttctgacctgcattagagtgtggtttctttgagtctttgtgcttcggtgaggactggggaggggaaaatggcctatgtggaggcagtgaaagaagaagaggaaaaaaatcgcacagatacagaataatactttgaattctaaccctgccacatggcttgtaaaactagaatatttcactctgattctgaataacttaacgagccttatttcagtagtttaattttgagaataatgggtcaagggctggtatatcagtggttaaggtgagggggaaatgtagctttttgtgtggtctcaaacactcatactaagacaattggaagacataaagggaagaatcatacaatctgttatatgctagctcttaaagtaaaagtagtagagttttttctagatttgttccataaactgccatttaactgtaccaggtaatgagatggccagatgttttcctactaaattggcacaacttaaaaaaatatattttagatttagggggtacacgtgcaggtttcttacaagggtatagtgtgtgatgctgagatttgagcttctattacccttgtcacccatatagtgaacatagtacctataggaagttttacagactgcatcctcctctctcctttcctcttcctcctcccccattttgaagtccccagtgtctaatctttatgtctgtatgtacccataaattggcacaatttctctctctaaatgataaatggctgattttggctgggtgcggtttctcacgcctgtaatcccagcactttgggaggctgaggcaggcggactgcttgagcccaaggagtttgagaccagcctgagcaacatagtgaaatccatctctacaaaaaataaaacaattagctaggcatggtggcatgctttggtagtcccagctacttgggaggctgagacaggaggatcacttgagcctgggcagttgaggctgcagtgagtcaagctctctaagtgcactccagcctgggtgacagagccagaccctgtctcagaaaacaaaaccaaaccaaaaaagcagacaaaaacaaccaccctaaaactaaaacaaaaggataagtttgattgaatgctcattttaaaaaatcagattctgtgctacaaaccttacaaatatatattatttaatatggttctcaaaacaactctatgagttagtttcttttatcttggtgggtaattaatggaattcccattttacagattaggaaattgagctgtaattttgctggagtcacacagctattaaatggtgggattgaaaaactaaggttgttgtgagccgagagcccctgctcacaaccccacattacacctttgctatagagatgagagatgattttttaggaaaataaagagtccagacagactctggcaagaccctggcatcaccacagccagtcttgagtctgaactcagctgagaagactgggtgtatcaatacagaggccatgctgacatgccttcctggacttggagaaatcctctggaggggatgaactcttaaagaatttagacaaaatttctattttgggtgtatctgcatatgtgtatttgtatatgggtttttaagtaggaatgttccagtaaaggtacagctgattttattctttatttttagataggtaaaatatctatatgagccacaaaacaacagtataaaatctttcttccattccttcagcccagtttgtaccccattccctttttcgtgtctacctcttaagagttccttttatacaactatgagtaaatgtaaaattatattcataagacttttctccttttatatacaaggtcatcatttttaaattttgtactttctttgtttttttcttttcttttctttttgaggtagtgtctcgctcttgttgcccaggctggagtgcaatggcgcaatcttggctcactgcaacctctgcctcccaggttcaagcgattcccctgcctcagcctcctgagtagctggaattacaggcgcctgccaccatgcccggctaatttttgtatttttatagaaacagggtttcaccgtgttggccaggctagtctcgaactcctgacctcagatgatctgcccacctcagcctcccaaactgctgggattacagacgtgagccactgcgcccagctctttgcttttttcaaatagtgatttatcttggaaatatttccatatcagtacatggagaggttcttcattcttatttacaatgtcataatatttcatggtgttaaatctgttatcacttattaaccagctctccattagtagacatgtgggttgtttccagtcttttgctcttactgatgcaatgaataaacttgcatatatgcccttctgaatatgtgtatgtatttctacaggataagtttctagaagtagaaatgctgtgttaaaagtatgcatttataattttgactgataatggcaaattgtcctcaataagagttacactaatttgtacttccactagtaatgcatgaagagagagaatttcccacactcctgccaacacagttaatggttgtctggattttggcccatttgataaaaaaaatgtttgaattttggcctattcaatagacaaaaaatattgcagattatttaaatatgattagttaagcaacttttcatatgtttgagtgccacttgtatttccttttctgtgaactttgcccatttcctattgacttaaggtcttttatcaattttagaaacttgtcatatattagggagagtagccgttgtctatgatatgaattgaacatattttttactgtttgacatttatgattaaatttgttagccttctcttatgtcttctgaattttaggtcttagttagtaaggcctttcccactacaaggttataaaagtcttctactatgtcatctagtgatttcatggttctgttgttcttacttaaatatttgctttatttggagtttatcttggtttatattataacacttggattgaacctttttttctcggatggctgtccaggtgtgccacaccatttagtgattaatgtctggtaattcagtgcccaatcattggagatgccacctttatcatatagcatatgccatatataattttacctatacttacgtaagtaaaatggctttactttagaatccagaggaaagtctgaattttcttgtgggaaccctagaagatttttttttttaagaccaagtctcactctgttgcccaggctggaccaggctggaccaggctggagtgcagtggcacaatctgctcactgcagcctctgcctcctgggttcgagcaattttcctgcctcagcctcccgagtagctgggattacaggcacccgtcaccacgcctagctggtttttgtatttttagtagagatggggtttcaccatgttggtcaggctggtctccaactcctgacctcaggtgatctgcctgtcttggtctcccaaagtgctgggattacaggtgtgagccactgcacccggccaatttttaaaaatcatggtaaaatatacctattattttcaccattttatatatattttcatttaaatggttaccactttaaccattttaaagtgtgaatttccgtggcattaagtacatttacattgttgtgcagccatcaccaccatcatctctagaacttttacatgttcccaccacatggctttgaatcaaatataccagtaattttatggcataccattcatttggaaggtgagtcctgattttacagatgttaaaatacggtaaaatatacatcttaggtatattttagttactaaaatatttagttactgaaatatagttctcaattttcaagtgtatttagtttatttctgaacattctaatctattacgttcgtttctccatgtgccagtgccacagtgtcttaattattgcagatttataatatcttttaatacataataaggctagtttctcctcactggtcttctttttcagatttctttctccagttattcttgtctatctgtctagataaactaagcagcttttccttggatattatagaccttcctttccctctttctgtctctattctacttaaattataaaaatttgcatatagatgactttatgaggcctgaagatgagctctaagtctaggatcagtttatcttctctgaaagtttgtgtatctcttgactttcttctccagggtttctgctttagctttgccacttcaagtgcagtccgttcctgaattatgttgtcagcataaaagggagctgctcctatgaaagttcttagagtcatttactgcttttgagtcttgtacatagaatattagtctttttcagtgatgttagcagtgtctctagaaggatggaaaacccgaaatgtctgcaactgcatcagggtttaaagtaatttacttatgcatttgccttcagtgggagtttgttgtcttgccagttattcatattaaatttttagcattttaaataatgtattactataagcttgactttatttgcatttatagattataaactcatttctgttttattttactgaagaacccattaaaagagccagtaaatcctgtggaaaatggccttcagtgatcttacatcgaggactgtgcatctttatgataattggatcaaagatgctggtgagtaaccacatttcctaattgaggttcatccttcctttttatgtcagattctcatatttaataggatttcactggaacagaatgagagactttgcaacttaacagtcccttattactagttaacgaagaggaagtgcacaggtttcattacagatatgtacaaagatggagctacacagatgttcattacaatgtttacagtaaggaaaatagcctagatatccagtgaagggaactgatcaataaatgatgactcattctaacttagtagccattaaaagtgattttggaaggacagtgctcttcagcctgattcttccctaatgctcctgagggaaattacagttaatgccaactcttttttttttttttaagacagagtctcactctgtcgcccaagctggagtgcagtggtgcaatctcggctcactgcaacctccgcctccctgcaacctccgcctccctggttcacgccattcttctgcctgagcctcccaagtagctgggactacaggcacccaccaccatgcctggctaattttttgtatttttagtagagacggggtttcactgtgttaggatggtcttgatctcctgacctcgtgatccgcccgccttggcctcccaaagtgctgggattacaggtgtgagccactgtgcccggccactgccaactcttttgaatgaaagagttgcagcccccaggaacctgtcagagtgaacagggaacaggaaaaccagggaatgactgcctgggacacctccgagtgattctgatatgcctgccttttacccttgcccatttattttaaaagtcaatgtttcagaagacattaatgccatagcaagaagtttaaaatatgttaaatgaaagcaggttataaaatactccatacatttctttcatggggtttagcagttatctctgggtaggattatgggtaatttttatttccgtagttatatttgtctacatatttttaaatcacaacaaatatgttgtgttgcttttataaccattttttaaagttttaaaagcagaacaaaagtaaaatttcaaaaaaaagaatcagagcatcttagaactgagatggatcttagatatcatcgaagctaatgcctcattttacagttgaagaaatgtgacctcaaagtcaagatggcagaaaagactagaacctatgtgttctggttattagttgtagtactctggtatttaacatttgagtttatttttgagatattgagctatacatactcaccaccatcactactttaggttgattcttacctatcaactagaaattgcaagtctaccaaattcaggaaggaaatgcacacctcttggcacctaccacagatgaaattatagtcaaatttacaacgatttcagcaaagatacactgtttcatcatttgcagctttctcagcagactactaaagaccaaatttatctcactaaaagtgttcccaacagtttttcctttgaggaatgccaaggttctttgtaagtatctcatagagagagaagcttcactgtggtaggggatacatagtgactatgcctatcttttcttaacttttttttcttagttttccaatatatgatacacagaatattcaagtttctttaggggtcatccttctctgaaggtttacagtagttctcataaagtcagtattaatttaaatactaatattttcattgcttttcaaggagaggtgtgccttgctacatgaactctcagtatttgaacttaggaaccaagtagattgggtttttgaaatagagttatttggaagaacagatctcttggtatccaattcttgatagtcactatcccagatacaagaatccaagagactcaaataatcaatatgctaactcaagagctgaatagatgtagataataataaatatctatgtagtcctagaagttaaaaatgccttaatatgaacttctttagaattccacttccacttttatccatggatcaactccttaatttttattaggaatacctacattgaaattgctgagtaaaattagattagatgtggagtggagtcctgacaacagcattgcaaacggtgcagggaagatgaggggagagaggcagggagaaggcaaggaatacttgtatttgaagttatgctcatttgaagacttgggaggggagagaggatatggggatttggagtgaaaagacctagatttaaggtctgacactgctgtagcccagctggatgatcttgaacacgttatttattggctgtgagtctttgtttctttattagcaaaacataagtgagaatagcatctaccagctaccagataacatacatgaaagtgctctgctgtttcggaagtatcccaacataaaagagtggtgctggttgttacagatgatagatttcatctgaaaattctcttcatatagcatatacttaaaaattgttttctttacataatttttttcccaggcatggtctaaaagggttaaaatgttttgttttgagatatacagctttataaaaaacgctgtcaggcataacaggaaagttttttccttctacttagtgtagtattgatctctgagatccattaggaatcatttttggccatcttagtccagttttagtctgcttaccctggaaatgtctgaacttatgatcaagggccaagaatttcaagtgtattcttggctttagccctaaccctgagtagcgtaaggaaacttactgatattcattggttttctgattgctagagaagtagtggtcatgcatagttatttcatgtggaaaaattccacagctacagaagaaaaaatggtttaattaatacttagctataagaggatttatttggattcttagatgtgaaatgtgagagtttgaaataatgctatggtagcattttggataatggagaaatgaaaaagtttttaatgtttaaaatacagctttccttgcgtttgattagaaatgatgacttttcagacttagtcatgatcctttttttgcaagaagatggagtatgagtaagattgctgccattctgaaactttaatacttcaaaaagtacttaaggtacatgtttgcttttccttccagcttcttcatttcattagtacttggaatcttaaagatgtactctttgagccagtacctgctacttaagaagagaatactctcttagaagcagctgatggaaaagcccattaatattctatgtatgtggcattctactttccctatgctctctccctgggacactcttagaaacgaattattaagctagtaataaatcagaactttggtaatcattggggtatagactgtcagacagcctgccttcccatcctctgcttctatcatggctctactcatgacacttaaaccaaatctgatgccaaaaagaaggtacatgaaacatcccccaccccattagccttttgtttctggggaagacagagcacctcatgcctaaccctaactttttcaacttatgtaatgatacagggaacattcaagtttctttaggggtcatccttttatgaaggtttatagtagttctcataaattcagtatttaacttcaatactaatattttcattgcttttcaaatagaggtgtgccttgctacctgaactctcattatttgagcttaggaaccaagtagctgtgggtgcagtgttttgaaatagagctgtttggaagaacagatcccctgctatccaacttttgctattcactatcccaaatgggatcataaacagagtcagaattaactttaactgtcacccagcaggtgcattgatactccctgtaacatgcccactaccttacatggaagtggactctctattcagaaaggtataactgttgctgagagagaaggccagaaaagtgaacaatggccggagtcatgggtgtcatcctaatgattttgtattttatttgctcagtaagggagagctaatttaagcaattttatttctcagtaagggagagctaattttatcagaggaagaattttaggacttgatttttagaaaatgaatttgacaattgcgtggaagaccaatgtagcagattggatcaggaggcagtgaaaccatataaaagactattgaagagtacctagtgaggggtgctgtagccctaaatacaggtgaggaaacttggtctcacaccagacccctagctcttaactatgacagttcatcacggtcaccaattaacaaattgttggctgctgacaaattataattacatatatttatggggtacaaagtgatgttgtgatatatgtatccaatataaaatgattaaatcaatccaaatagcatatccatcaccaaatacttatctttttatggtgaaaacatttgaaatttactttttacaattttgaaatatacagtattattagctctagttatcatgctgtgcaataaatgtcaaaaagatatttcttctgttgaactgaaactttgtaccctttgatcaacatctccctatttccccagccccctggcctctggtaaccaccattctactcttcttatataaatatgattattttagactcctttataagtgataacatgtcttgcctttttgtgcctggtttatcttacttagcataatgtcttccaagttcatccatattgtcacaaatgataggattttctttttgaaggctgaataatagtccattggttatttctatctatgtgtctacaggtctgtaattcagaaaggcataactttagattgacaggtatcacattttctttatccattcacccattgatggacacttaggttgattccacatcttggctattatgaataatgctgcagtgaacatgagagtgcagatatcccttcaatatgctgatttcatttcctttggatatatatctggaagtgagattgcaggatcatatggtaattctatttttagttttttatagagccttcatgtagttttccttatagctatagtaatttacagtcccaccaacattgtacaagggttctcttttctccacatccttgccaacgcttgttatcttttgtctttttgataacagacattcttacaaatgtaaggttatatctctttgtttttttaatttgcattttcctgatgattagtgatgttgagaattattttcatctatccgttggccatttgttatcttttgagaaatgtctgttcaggtcctttgcacatttaaaaaaatggatgcatagaaaccgtgtcctaggattctgattcaattggaccaaggttgttttttgcaatttgacttttaaatactgcagagtcaatttggctgtgctaacagaattgagatctgctataataacagtagcaagcttattgagcacttaggctctttacatatagtaactcaatcaatcctctatgaaatacatgccttttaatgcccaatttgcagatgaggaaactaaatacagagaaggtgagtcaattgcccaaggtgacatagcgagccagtgggagaaccaggatcagaatgcagactgtctgactccagagttttgctgaaatagaatttctaaagcttggtattttgttttattatttgctttgaagataacatccaattaaattaaccagtgtttcccataattattttttatctgtagaacttgaaagtcacgtacaggacttaaggtgtgtgctgaaaatattaaattacgggaaaaaattatttattttaaaattattttattctgcttcctgagccagcccagcatgcttttcctggcttgttttctttctactgctaccagaggaagaacagagaaatgatgtcatttgatttttccccctcctgagtcaatgaaagaataaaataaaatatatctctcattcagcaattcttttactgacatttaagctcgtttctaaccatatgtgtgatgactgttaataatagaatcatttgaaattgtttataaagcaaaagaaaaaacaaaagtcaactaaactcccaccatgcaaaggtggtgatgtaacatccttccagaggtcttcttttggtattttgtttttctttccttttttttttttttctgagacagggtcttactctgttgcccaggctggagtgcaatggcatgatctccggttcactgcaacctccacctcccgggttcaggctcttctcatgcctcagtctcccagatagctgtgattacaggcgtgcgccactatgcctagctaatttttgtatttttcgtagagacagggtttcaccatgttggccaggctggtctcaaactcctgacctcaagcgatcacctgccttggcctcccaaagtgctgggattacaggtgtgagccatggcgcctggccagtattgttttcattagttttttatttcattagcaataacaactagacatagtaatatgaatctcatcttgaactgtagttcccataattcccacatgtcgtgggagggacccagtgggaggtaactgaatcatgggcgcagttcccccatgctcttctcacgattgtgagttttcacaagatctgatggttttttaagcatctggcatttcccctgctggcactcattctctctcctgctgcccagtgaagaggtgccttatgtcatgattgtaagtttcctgaggcctccccagcaaatttaaatctctttgctttataaattacccaatcttgggtatttcttcatagcagtgtgagaatggactaatacagtaaattggtatctcagaatggggcgctactataaggatacctgaaaatgtggaagtgactttgaaacgggctaaaggcagaggttggagcagtttggaggggtgagaagaagacaggaaaatatgggaaagtttggccgggcgccgtgactcatgcctgtaatcccagcactttgggaggccgaggcgggtgagtcacctgaggtcgggagttcgcaaccagcctgaccaacatagagaaaccccatctctactaaaaaatacaaaattaactgggcgtggtggcgcatgcctgtaatcccagctactggggagacttaggcaggagaatcacttgaacccgggaggcagaggttgcagtgagccgagatcgtaccgttgcactccagcctgggcaacaagaacgaaactacatctaaaaaaaaaaaaaaaaaaaaaaagggaaagtttggaacttactagagacttgttgaataactttgaccacaatgctgatagtgatatggacaatgaaggtcaggctgaggtggtctcagatggagatgaggaatttattgggaactggaataaataacactatgctttagaaaaaagactggcagcattttgcccctgccctagagatctgtgaaacttttaacttgagagagataatttagggtatctggcagaagaaatttctaagtggcaaagcattcaagaggaaggaccataaaagtttggaaaatttgcagcctgatgatgcgatagaaaagaaaatacaattttctagggtgaaattcaagcctgctgcagaaatttgcataagtagcaggagctgaatgttagtcaccaagacaatggggaaaatgtctccagagtatgtcagagaccttggcagcagcccctcccgtcacagacctggaggcctaggaggaaaacatggtttttggggctgggcccagggctccctgctgtgtgcagcctagggacttgatgccctgcattccagctgctcctggaatggctaaaaagggccaaggtgcagcttgggccatggcttcagagggtgcaggccccaagctttggcagcttctccatggtgttgagcctgtgaatgcacagaagtcaagaattgaggtttgggaacctctacctagatttcagaggatgtattgaaactcctggatgtccaggccgaagtttgctgcagaggtagagccctcatggagagcctctactaggtcaatgtggaagagaaatgtggggtcagaccccaaacacctagtccccacttgggcagtgcctagtggagctgtgagaagagggccaccatcctccagaccccaaaatgctagatccattgacagcttgcactgtgcacctggagaagccacagacagtcagttccagccagtgaaagcagcaggaaagggggctgtaccctgcaaagccacagaggcagagctgcccaaggccatgggagcccacctcttgcaccagtatgacctagatgtgagacgtggagtcaaaggtgatcattgtggagcattgagatttaatgactgccctactggattttggacttgcatggggcctgtagctcctttgttttggccaatttctgccatttggaatgggtatatttatgcagtgcctgtatccccattgtatctggaaaataactaacttgcttttgattttacaggctcataggcagaagggacttgccttgtctcagatgagactttggatttggactttgagttaaagctggaatgcattaagacttttggggattgttcggaaggcatgattgtgttttgaaatgtgaggacatgagatttgggagggcccagggacagaatgatatggtttgactgtatccccacccaaatttcatcttgaattatagttcctataatccccacatgttatggagggacctagtgggagataagtgaatcatgggtacagtttccctgtgctgttctcatgattgtttctcacaagagctgatggttttataattgtctggcatttcccctgctggcactcattctctctcctgccacttcatgaagaggtgccttctgctgtgattgtaagtttcctgacgtctcccaggccatgcagaactgtgagtcaattaaacctctttccttgataaattacccagtctcgggtatttcttcatagcagtgcatgagtggactaatacaatgatgttcatgtatttaaggtttgcactacccacttatagaagaaatctatcaaagtttgatcagttctaattttttcccttggtccctggttctgtgacaacttttatttatggagacttcctttgtgacatacagacccatagcaagccttccttgtggtggttttaattgcacaaaacaacgagacatcctagaaagcttgccattgttaaaagcaaggaggggaaccaatagaagcagtaaaagatttcagtgatgtgtacctgggtagctgatttcaaagtttttcctgatttagaactgtgacaaatcttaatatgagaaaatacttccgaaattatagaactttatgttttgaaaagtgtctgtcatcaaacttttgtttaatttctattttgtgcatgacaccttgttaaaattattctgctgagagcatcagagacgtccttttgttaaatgtagtggcatttttctgtccccattttatttcccctttctgccacacttaatgctttgactccttccgaaaatccactcttccctggcttcaggatatctcacttttatggttttccctctacttctctagctgttcctttttggtttttatgttttttccttcagtaattccttctgtgaatgctgagtcctcaggatcctgacttcagcacttactctccttactgtacccacttagcctaagccaatctcactgcttttattgttcatcatttatgtgatggcaaccctcaatcttatatctctggcacagatctctctcctaattctagatccatatatccagctgcttatgaaagacttcatatgaatgttttaaaggcagtctaagtgtaagatgttttaaaacataagccacctctgcttgaccaatattgctcctaatcctgtgttcccaatctaagtgaatttaaagatctgagtatttttcttttaaaaattttttttttaatttttgcgggtaaatagtaggtgtatatatttatggaatacataagatgttttgatacaggcatgcaatatgtaataattatatcatgtaaaatgggggtatccatcccctcaagcatttatcctttgggttacaaataatccaattatattttaaaacatacatttaaattattattgactataagtcagcctgtcgtgccaccaaatactaggtcttattcattctattttctttgtacccattagctattcccacctcccccccaacccccctagtacccttcctagcctctggcaaccacccttctactctatctccatggacttaattgttttgattcttacatcccacatataagtgagaaatctgaatatttttcttaacatttacctatttccattccctgtgtttaaccaattataaatttttatattttcttcttccttactgtatttcaaaataatctcctatttatctgtcactatcactacctgtttttaaaatttttattttagattcaggtggtacacgtgcaagtttataactaggctatattgtctgatgctgaggtttgggcttctagtgattgcatcatgaatatagtgaacatagtacttaaaagtatgtttttcagcccttgtccccttccttccctcccacattttggattcttcagtctgttgttcccatctatacctgcatgtacccaagacttagctcccacttataagtgagaacatgtagcatttggttttgcatttctgtgttcatttgcttaggataatggtctccaactacgttcatgttgctgcaaaggatatgattttgttctttttaatgactgcatagtactccacagtatatatgtaccacattttctttatccaatccaccattaatgggcacctaggttgattacatgtctttgctgttatgaatagtcctgcagtgaacatgcaagtgtatgtatatttttggcattttcctttcagtatgtacctaatagtggaattgctgggttgaataatagttctatttgcagttttttgagaaatctccaaactgctttccacaatggctgaactaatttgcatttccaccaacagtgtataagcattcccttttctccacagcctcaacaacttctgtaattatttgactttttaatgtttgttggccgcttgtatgtcttcttttgtgaagtgtctgttcatgctctttgcccactttttaatgaagttatttattttttcttgttgatttaagtttcttgtggattctggatattagtcctgttggatgcatagtttgtgttttctcccagtccataggttgtctgtttactctgttagtttcttttgctgtgcaaaagctctttagtttaattaggtcttaattgttgatttttatttgtgttgcaattgcttttgaggacttggtcataaagcctttgccaaggccagtgtccagaagagtgtttcctaggttaggttttctcctgggatttttatagttttaggtcttgcatttaagtctttaatccatcttaagttaatttttgtgtatggtggtaggtagtggtccagtttcagtcttctgcatatgattagccagttttcctagcaccatctattgaatagggagtcctttccccattgcttattttcattgactttgttgaatatcagttggttttaggtatgctcctttatttctgggttttctgttcagttccattggccgatgtgtctatttttatatcaataccatgctgttttggttactgtagccgtgtagtacagtttgaagtaagataatgtgatgcctccagctttgttctttttgcttaagattgctttggctatttgggctcatttttggttttctatgaatttgagaatagttttttctaattttgtaaaaaataacattggtaatttgataggaatagcattgaatctttagattgttttgaacagtatggacatctaacaatgttgatttttctaatccatgagcatggaatgtttttccatttgtattttccatgatttctttcagcagtgttttgtaatgctccttgtacagatcttttacttccttggttagatgtattcctatgtgttttattttttgtgcttgtggttattgtaaataggattgcattcttgatttggctgtcagcttgagggttgaagagctgttccaagctcttaaggataatgctttggtgcatagaaatgctactgattttcatacattgattttgtatcctgtaactttactgaattcatttatcaaatataagagttttggctgggtgtggtggctcatgcctgtaatcccagcactttgggaggccaacgtgggcagatcacgaggtcaggagtttgagaccagcctggccaacaaggtgaaaccctgtctctactaaaaatacaaaaattagctgggcatggtggcgggcacctgtaatcccagctcctcaggagactgaggcaggagattcacttgaacccaggaggcagaggttgcagtgaaccaagatcatgccattgcattccagcctgggcgacaagagcaagactccgtctcaaaaaaaaaaaaaaaaaagagagttttatggtggagttggtaggtttttctaggtagaagatcatatcatcagcaagcagggataattttacttcctcttttccaattttgatgccttttatttctttctcttgcctgattgctctggctaggacttctagtactatgttgaataggagtgggcatccttgtcttgttgcagctcttaaagataatacttccagcgtttgcccattaggtatgatgttggctgtgggtttgtcatagatggcccttattatttgaggtatgttcctttaatgtctagtttgttgagggtttttatcatgaatagatgttagattttattgaaaactttttctgcatctattgggataatcatatggtttttgtttttaattctgtttatgtggtgagtcacatttattgacttgaatatgttgaaccaactttgcagctcaggaataaagcccacttaatcgtggtgaattaactttttgatgtgttcctggattcacctggctagtttgttgaggatttttgcatctatgttcatgagagatattggcctgtagttttcttttttgtcattgttgttgttgttggtgtgtctttgccagattttggtgtcaggatgatactggtttcatagaatgagttagggaggaatctctcctcctcaattttttggaatagtttcagtaggattggtactagctcttctttgtatgtctgaccacctactcttcagtcatttaatttataaatttattttagtgttccacagaacattagtttcataagatgttaaataacattctacaaaaaaaatagtgttttttggccaaatacgtttggagaatatggcatactgccattcccatcgtggcaattcatgatgaacatgaagcattaagaaatcctgcagtaatgcaacctgtttgtttaacccagcattccagtattccccaattctttgtggaaagtctttaaatagcttgtttccatgcatagtttggaatattcttgtttgtataggatataagataagaaacaaactcatttttctcccaagcagtcagttttcctatcaacatttgttgaagatctcttccttccctgcttgtttctgggacttccttaatcatatattaaattcttaaatgtcctgggatctagtctggagctgactcttgactctttggctttatttctttattttttttgagaggggcctctgccagtatttttgagggaggcttatttgaatgcagaataatcacccatgcacatctgatagtcaaatgtaagcactccagcactaaaattgaggccaagtgagttatcagtcatagagtcctactgaagaaattttgagtgggaagtcacacttgcaggggtattcagaatttgtcagtgcttggccacatcattagcagcttaaaagagcaagagctacattctccctacccttcttttccaattgataaaagtgacagtagttagcatcctgaggttagtcatggcataattttgagtcaggtccttctgggaacttgtccttacttcctttccttcataatactctagcttcatgaggccatttagtaaaattaaacctgaactactagaaattatagacttaatcacatttcatcctgagttgtaattttttattcatccatctctgctggcctggagctggcagtaagcagataagtttttgtttgcaattgtgagaccgtgcattttttttgctcagaatatcacagttgttagctcacatggactccaaaatcccatactttagctacttagaggatgttcagcctttctattctgtgatcctgtgatacagtatatgtggaagtgtgccagttttcctggggaaggaaaaaaattaagcagcaaacacaaactttttttaatatataaaagcatgtatggatggaaaaactccaagatattaataatgactatagacacatggtgggatgttgctgggtgttctctcttccagatagctttgcaccctgtgctgggccctggagaacgatccatgaagactgtatccttgggtttgctcccctgccgtatgctttctggttagattcagccagtggagagagggaggagagtggagttggggtatctattcctctggcgccatacttacagaattgtcttgggctggctgaatccctcaactgacagtcaaaacttgtcttagcatactcaggatgcttaagaaattatcatagactgggtagtttataagcagtggaaatttatttctcacattcagagggtggaagtctgagatcagggtgccagcacggtcgggtactagtgaggaccctcttccaggttgcagactgccatcttctcattgtatccttacatggggaaagagggcaggagagctccctggggtgccttttataagggcactaataccatcatgcaggcgatcagtgcataatacagctcctctcccactgtttctagccccaggatacttccttattcctgttgatttctttttcacctttctaaagatactagtgatcactgcccaaatagctcacagttaatagtaggatctgggtgctcagttaaagaaatgttggttgctgttagttaccccttggctaagcaggtgtgtactcacatattgtttttctcttagatccaagagttgaagattggctcctcatgtcctcgcctctgccacaaaccatcctcctaggattctatgtctattttgtcacttccttgggaccaaagctcatggaaaatcgcaagccctttgaactcaagaaagcaatgataacgtacaattttttcatagtactcttttctgtgtatatgtgttatgaggcaagtgtcttcagtattcctaatgggagaattttgcctgagtttttctgtttatgtgtcattatgttttctgttataagggtaaactttgcaatttaaggaattaagaaactgatctcactagagcaggtatttgccaaaatagtgttaggtatagaccaaataataaactcatttgaggatctcagtataatctgtctcacagataatgagaaaaactaacatctattccatggatttgtacataattgccttaatggattattgaattaatccataaattttagttttgaggaaactcttaaagtaacatagctggtaagtggagggctgatatttgaacccaggtctgtctgacatcagagttcatcttgactcagtaaaaagttgtcatcatcatggtaggcacctttggtttctggatactctgatgaactatgggatggtagactgttttggttagtttagctgggctttgtggggacagagagcatagactcatataaagcagtaggtgagggagcctgttccttaatttttttcccattaactcattaattcattactgtcccttaattgttaataagagagatggggctcttccaggaccctaaaacagattcatgaattctctctcttcccctgtgctattaacatgcctcagccacccccatgtatgttcttttctgagattccttccttcttttccaactctggctggcttcattatccttttttattaacttcctctatagcataactggtgcttaatcataagtagggctcacgagggcccaatatgggcccactgacctctcctggcaccatagtttctccacatgcattctgacctgactcttgctacagatccatcatatcgatcactttaaatctactgtggctggccaggtgtggtggcctacacctgtaatcccagcactttggtaggctgaagtaagaggattgcttgggcccaggagtttgagaccagcctggacaacatagggagaccttgtgtctacaaaaaatacaaaaaaattagccaggcgtggcggtgcacgcccgtggtcccagctgcttgggaggctgaggtgagaggatcacttgagcctgggaggtcaaggctgcaatgagccgtgatcatgtctagtgacggagcaagaccctgtctcaaaaaataaaaataaaaaaaatactctggccttatttctcacagtcctccctatagtctggactcactctgctgctttccatttcttctattttattttgaaaattaactcacaggccactcttaatgtcccttcaggagtatgagcaactgagaggaaaagagtgatagagatgggagcaaagaaaacacaaggtcctagcatggtcttaggggacagcatgttgtagtaaggtgttaagaacatacctggaagccaggagattaggaactagttagttctgcttctgccactgactggctgcctgaattttagcaagttatttaacctctctgggcctcagttctctcgttttataaagataggattgaaccaaatagtctctcagatccctccttgctctcatattcttagggtctatgtctgatttgtcattgagtgtaatgtacccaaatatatttctcaggcttggaaagaatccagtcatcgccagtcagctttgattcctacttgatcaattacaatgtaaaagaagattttaaaatatctgaatttgagagtttctgactctcatttactgctaatacttgagttacttatgtgtcagtttcaggaactacctgccaaatataaattattactttctgaattcagggaattcttttttttttttttttcaccagaaagggtctcgctctgtcacccaagctggagtgcagtggcacgatcttggctcactgcagccttgacctcccaggctcaagtgatcctcccacctcagcctcccaagtagctgagactacaggcatgcgccactatgtctagctaattttttgtattttttgtagagatggtgttttgccatgtttcccagactgctctcaaactcctagactctagtgatccacctgcctgagcctcccaaagtgctaggattacaggtgtgacccactgggcctggcctaatttttcttattactagcctggaatatagacatatatgtaaaaagttccacaagctgttggaatgttcttaaactttctactctatttaaacaaaggcttttgatagccacacagcatgccatccatctgttgatggcacatccgaacacatggtttattgtatggagtatgatttcatttggtttacaaagcaaacacctctaccaatgatgttaggccaaatctgaagaagttgaaagggaaggacatcagactcaagaaactcagatgccttcttgtgtagtgattgtttgaaagtgctagttacttggcagcagtcagacactagcagagaccacttaagacccaacagaaggccaagtctcacaactttcattcgacacagtgcttgtttggggtagggtaaggtggagaattattcatcacaattccagtaaatagctcctggccacagagcgttacattagtcaaaaatgagtctgagcacaagagaatatgaggacactcactgacagtaggattttataaaacagaattagccatttctatgtcacgtgcccttattcatttggcaaaatctattgatttgttgttgttaactatttttctcattcgtgaaatatcttgtgcttttctgagtcttaattttcaagattttataacttaccaagttaacagtgtgattaagttatcttataagtcaagctagaggctagtctcagaaaagaatgttgcattttataatactatagtgtctaataattgttcttctcctttgtttcttttctttacacaatcagaatattattctgacaatgcctcataagcttttgtttttagaatttaattaattgtaaagttctaattttagctttaatagtaattaaaactagaaatttaaaatatggttcaatggcagaaaaggatataaccattatactgagagagaagatctcccagggggtatttggcatgtatgagaagaactgatcatattgtcagtgccctaaattaagccaacaatttcatatatgtgttaagttaaaatcagagcccttggcttttccttttcagatactgttttaaaagaagaccttcccaccatcagactgaaagaatgtcagtataatctttataatctttgaattacacttcagatttatcaacaataggctctttcttgtcacatcagccttggatcactttgtgggtgtgttggaattaaggcctgccagattgcacttttattgttaacgagcattttcctcttttacttgtcttgtgaatccacagtaaaactattaataatatctgagccatggactaccacctcacatcacactcaccagccaatgatgggaaaagcccagttgtcgcagctatcttatgagtacattgaggcattttggtttgcatgtttagttattgactaagtagaaagactggaaattgctagaaatgactgattcagatccaagtgttccctttaagagtacacaaacacattcactcacacatacatagatgaacctaagataagtcacctaccagtatttgctgtttaagcaaaacactccaagtgttttattcttcaccatattagaataatcatcccaagagatgagcattttagtcagagcacagtttatataaataatatatgagtttgtggttttgaaaattcttgatatcaagctttgatatcaagcatgttcattttgtatttgttccagctaccttttcctctgcactgactattgacttagctgaaaatgtaatgaagagacactatcaaaactacctttgttgtggctgttgggaaaatgctttcctttcttaatatgcatgtgctctcttgcagtttgtgatgtctggctggggtataggttattcatttcgatgtgacattgttgactattcacggtcacccacagctttgagggtaagtttctctttggaaaaacttgaaattcaaaatcaatgttaaaattttgtgaactgtttgtaacactgaacgtaaacttagaataagcagatgactcagttatcagattgtgtgtgttgtggtggagaaagtgaacaattacaagaataaaaaaaatcacatgtataattttctataaaatgaaaattggtgcttttcttttttaatttcttggatttaaaaataaattcacatgtggttcctcaaaaaattgaaaatagaattaccataagatccagcaattctgcttctgggtatatacctaaaagaattgaaaacagagacttgaagagatgtttgtatactcatgtttacagcagcattatttataacagccaaaaggtagaagcaacccaagagtccatggatagataaatggataaacaaggccaggtgcagtggcttacgcttgtaatcctagcgctttgggaggctgaggcgggtggattgcctgggctcaggagtttgagaccagcccgggcaacacggtgaaaccccatctctactaaaatacaaaacttagcagggcatggcagcatgggcctgtagtcccagctactcgggagggtgaggcaggaaaatcgcttgaacccagaaggtggaggttgcagtgaaccgagattgcaccattgcactccaacctagatgacagagtgagactccatctcaaaaaaagaaaaagataaatggataaacaaaatgtggcatatgtatagaatggaatatgattcagcctttaaaaggaagggaattctaactcatgctacaacagggatgaaccctgagaacactatgctaagtgaaataattaggtcacaaaaggacatatactgcatgatttggcttatatgaggtgcctagcatagtcaaattcatagacacagaaagcagaattgtagctggggttagagagggagaatgggatgtagtttagtgggtgtagcttcaattttgcaagatgaaaaaagttctatggatggatggtggtaatggttgaacaacagtgtgaaggtacttaatgccacttaactgtgcactaagaaatggttgacatgacagattttatggtatgcatattttaccaaaatttaaaaatataagcttttcttccatatacaaaataaatttagatttatttgtgcttctgcagatggcacgtacctgctggctttattacttctccaaatttattgagctattagatacggtgagtatatggccaccacatttggtaaatgtttgatcttaaatgtttgatcttaaatgtttgatctttcagtgaaaccaataaactgctgtagtttcagttgtctgataactttggttatttctcctattcaggcagacctactgttatcttttttaccttttattatcagtaactttagagaatagataggataaccttattttttcagtattttgcaaactctataaagtttctgttacatagctatcagttgattatgataagcatggtgactgtgtcatatactccaaaactgcatctttatatagatggatgacagttgttttatgaatcaagttcaggaagtaaaaagcagaaaacatcttacctttgtttgtttgtttttttatcccaaagcacagtcatccatattcctttaggaggatgaataaactttcacgagaatgttgcattacccctgggctgtcggtaattcagctgcttttctgaagtctgtgcttactgggccctatctcttcctacttcagatcctagtgaggatcgcctctgaacttggatgaccgggtcttgggagaagcacgtgtcacaaattagcgtctgtgatttagaggagaaagccatgaacctttgtttccagaggagcttaggaaagctgaatatttgttgtatctttgcagcaagtgtatcttagttatttggagctagttttggctcagactgaaaagtgtgttttctttggaatgcataccatgatatttcttgtaggaaatctcaatatgcttcaccttttgaaatgactaatcacataatgttagaattggaaaggacttgtgtgaacatacaatccagtggttctcgaactttaacatgcatttagaatcacctgagacttgttaaaacacagctgcctcgacccccacccccagagtttctgattcactaggccttggatggggctcaaaatttgcatttctaacaagttctcagatgatgctaatacttattggtccagggaccatgttttgagagcctgtattctggtggttccagcccacattgtgcaatagaattaattgcattagggaaaacaacgacgacaaaaacaagccctacctccagagatttggtgccatatggtctggaacagagaccaagcatagctatttttaaaaagcttcttggatattgtaatatgcatccagggttgagaagcattagtccagaaccttcactctgagaaattgaagccaaggagttaaatgacttacccagaggaatgctgctactaagtgggactaggacccagagtgttagtgtatggctttttctgttgcaccactcagccttcttccatgtgcgtaagcaaacgcattttgcacttggaaatgtgcaaaatttccatattctcagttgctttgcatgttctcagttccagcttccgtaaggaaactgcactgcttctgtgtccttccctaaactacattgctcaaatactcttaatacttttctttgtgctattctgtttagtcttgtatttaaaaatcttaacactcgtattcttaatttcactttggaatattttttgaaaatttccccctctcccaaattctaccattttgttgacagggtttttacaaaccactggataacgttcactctgagtgttaccttccttcgccttctcattttttttctatgcagttttgctttcttttccctcatatttctcaaattaacttttcaactttttctcccttcatttttctttaataataatttcctaacttttgatttgttgcaagtcctcttcgtttgcctaatcccttatccatatcagtaagatgtattagaaagcaatgtagaatatttcaatcataagtcttctgctttcccatacacttcaaaatccaggggaatttttttttatcaatacaatttctttcaataattttggccatattccttactttatatctttgatttttaaatctacataaagtttctttttgcctttttattggtgtttccatgtataggcgtcgtacctaagttacttcataataattagatttgagctgccccttggggaattagctgcttctgtaagcattctataaggcaacacttttagaggaaattatgatatgaaatactttgcactttgccaatattttttataatactcaatacactatcaaatgattttctgtgaacttgatattctttaaattatttcagatcttttttgttctgcgcaagaaaaatagccaagtgactttccttcatgtattccatcataccatcatgccgtggacctggtggtttggagtcaaatttgctgcaggtagacaagggaaatttgggatcatgtgttataaacaacatttctatatgctaaaaacaaaatatttttctaaaatgtgatttataagaaactcaaaaaaatcaaagagtcactttgtttatacttatttcattaattattacttgaaaaataaacataagactcataataactaggtttaccccactctttagatatacataacttctgggcacagccttctacacatattctttagttgttttgtttgtattttattcttttcccagagaggtttattaaatatctttaaataaataaataataaataaatcaaatggtaaaaactttggctttataggagtatagagaacaatttcctgtatgctcccaggaagttagaatgcttatctcaaattctatgtcttatttgccttcaaatttctaatagctgacacacactctaacccctaatagctctttaaagatgtgtcaaattgtggttaccccaacttcctaaagcatcctaccatattaaagaatgtgttgatactgtttttaaggtccaaaatagtttaaatggaaagtttggaaaacaggtcgtttcttttttgttttaggcttctgaacatcaagcattggagaaaccagaaataattttatcctattatacagttttaaataggtgatatccccaaggatatattcttaccttaggaaaatttggttgggggatttatttgttccagtttcttaaattttaaaagtcttcaaatagacctatagctgataacatttctgtgaatagcttgcctctattggcctttctaactctgctagactaaaagaaagggggaaccacaattgaggaactcttgtttgagttctagactctctaaacatggaggaaaaatatctacatgtctcagagcatgggaggacatggataagcccgtgtcaggaaggggatgccagaactcagaggagccacaggggctgtgaatcatgagtaaacagctgtcgctaccatggcttatgggcatcggattttccaggatgtaaagtacctccttactcagaattggcatttattactgaagaatgtttttaagtaaatgtagctgctttttcttatgaggtttgttagtataaacctttcatttacattaaaacaagatagtctcagtggtgtccatttgtcaaatcaacagtaactgtattaatctccattattttacttatccttactttctgtgtttctatttccccttatatgcatattgtcccttcccattctttctacagtgatatacattgacacttattggtgtttgtgaaaaactggaaaatacctaaacactcactaatagagtggttattattacttgtgtctatatgactgtgaaacaaaaatgatattcagatgtattaaatgtcctaaaatgaggatcctatacacaaagatttaacaaagctcatcttctttgttaagcgtcttgactcctaaattatcagaaatagatgactattctatttttaaagtatgctagaaaaggtgctttcacatccttataatttatttattctgatttctcccatgaggccaggatacacactgaaaactaaatgtgaatagaagaaagattggaaggcaatatcccaaaatataaacagaggtggtttggagatattgaaacaaaaagtggtttttttctccctctttatttccgtccctttctctatattttctaatttttaaatattgaatatctgacagttcaagaatgggagaaataaattttatttaatgaatacaattgagcatttttctaacttctatgtttgagttcattgatagtgtagtttccatttcaaaagcaagcagtgctttcaataatgagaatttaaatatgatatacttcaattttttttttttttttttttttttgaggcagagtttcactcttgttgtccagggtggagtgcagtggtgtgatctcggctcactgcaacctccgcttcccaggttcaagcgacatacctcagtttttaagtggtactatgtttatggacatcagtcactttataacgggtttcttgtccacaccttaatccttcttcttctttacaaaatgagaatagtagaagatagttttcttctctctcatatgttccatgcattggcacttctgttcagtcttacatgtggaattctagtaaacactgactactcctaccatcatgacccctagccataatatgatttatctccacactagcagaaactaaccgagcccccttcgatcttacagaaggagaatcagaattagtctcaggcttcaatatcgaatatgccgcaggcccatttgccctcttctttatagctgagtatataaacattattataataaatgccctaactgctacaatttttctaggagcactatgcactatttattcaccagaactctatacgatatattttactattaaaactgtcctcctaacctccctatttttatgaattcaaacagcatacccccaattctgctacgatcagcttatataccttttatgaaaaaactgtctgccactcacactggcatttttcatatggtatatttcaatacccgtcacaatctccaatattccccccaaacctaagaaatatgtctgataaaagagttactttgatagagtaaataatagaggtttattcagcagacctgatacctatttcagtgacaagcacagcaacaaaagctgttcccagaaatgttgtttggcgctgaggtccattcctagaatgaaactgtccattccaaactgatttttgcaaaaacttgagcacagctgatctctatctagtatttaatttcctatttttctgttgtactcctcaatggggtaatagcaatccagctattcttttgaataggatgaagatatttctgtggtaggtttttacattaattgtgcatatatccccttccagagatatggagaattgtgataattacccaggtgattcctttgttttttccaaaggagtaaaatgtgatggtactaatcgtaattcattctgagatgtctgtttacagacccattatcataaagaagaaaacaggcttagaaaatattttgttaggaaagccttccaaagaagatacaaaaaacattattaattaaaatatggttgttttgtaaatattaaaatagcttgtcagaaaataatcataactagagaaagtaaacatgttacttttatttgatagcttattttgatcagtaaaccttactaaacactcttggctacactagtgctttgttaaatccctgtgtctaagatcctcattttaggatatttaatggtgaaaatatccaaatagaaaataggcactcctgaaactggatcccttccttacacctgatacaaaaattaattcaagatggattaaagacttaaacattagatctaaaaccatgaaaaccctagaagaaaacctaagcattaccattcaggacataggcatgggcaaggacttcatgtctacaacaccaaaagcaatggcaacaaaagccaaaattgacaaatgggatgtaattaaactaaagagcttctgcacagcaaaagaaactaccatcagagtgaacaggcgacctacaaaatgggagaaaatattcacaacctacccatctgacaaagggctaatatccagaatctacaatgaactcaaacaaatttacaagaagaaaacaaacaaccccatcaaaaagtgggcgaaggacatgaacagacacttctcaaaagaagacatttatgcagccaaaaaacacatgaaaaaatgctcaccatcactagccatcagagaaatgcaaatcaaaaccacaatgagatactgtctcacaccagttagaatggcaatcattaaaaggtcaggaaacaacaggtgctggagaggatgcgaagaaataggaacactttcacactgttggtgggactgtaaactagttcaaccactgtggaagtcagtgtggcgattcctcagggatctagaactagaaataccatttgacccagccatcccattactgggtatgtacccaaaggactataaatcatgctgctataaagacacatgcacacgtatgtttattgcggcactattcacaataacaaagacttggaaccaacccaaatgtccaacaatgatagactggattaggaaaatgtggcacatatataccatggaatactatgcagccataaaaattgatgagttcatgtcctttgtagggacatggatgaaattggaaatcatcattctcagtaaactattgcaagaacaaaaaaccaaacacctcatattctcactcataggtgggaattgaacaatgagaacacatggacacaggagggggaacatcacactctggggactgctgtggggttgggggacgggagagggatagcattaggagatatacctaatgctaaatgacaagttaatgggtgcagcacaccagcgtggcacatgtatacatatgtaactaacctgcacattgtgcacatgtaccctaaaacttaaagtataataataataaataaaaaaaactttagacaaattaaaaaaaaaaagaaaataggcacgcctctattaaataacaggagaggtgtcttagttagaaaagctctgacatagttccatatcaaaggtgaaatagatgtcctatgtgtatattattatgaaacacaaatgaatttgagaggtatttggcttatcctccttttaagcaccttgactcctcaactatcagaagtagacaactattctatttttaaattaacctagaaaaggtgttcttataccacaataatgtgtttattcaaatttcctttgggaaagaagaccattccaaatataaataatacaagctggaaagttgttaatacgcttaattaattcagttccttctgacttgaaatttatggtaattgagggattagctaaaatatggctttctcttgtcaggaggagaaagtttatgtagaacagtatagcataaatgaggctttgggagaatacttaactgcttaaaagtaattatttaaaacaggttattttaacagagtacttcagcagtgctagtatctagaaatatctagaattgctgcaattaggaataattatttaaaagcaatttctactgtgtaacagttttgttagattttctccagatcatattagaagtgatgaatttgtattttcctttaaactttctgtaattcatagtgtttatgaattcagttcttctcctaccataatctaaattgatgagggtttgctttatttctagaattaaagaatactggaattaagaaaatagaatgttttagagaaaaatgtaaattccaggtcaacattactaagctgagtcaggctatacataaagaacacatattcttccagattgtcgtcttaggaaacggaccccagggagagtgttcctcccgccacactatcagctaaacaccgtttccccttctgctgtattactggtccagctaaagacaattgaaatgattttttcttacattcccacgtgttctttgcttctattctcaattgaaggtgatgggtaggaaatgtggcgaaatgagaagaagaaaaccaaaataggaaggcataatcaattggaagccgtaaataaggatggtttcacagttagtagatatttactttgggaaaacaataattaattaaattcagcagtttgctagtgaaagccagtggttttactgccaaaattatttaatgaagattattgagagtaggaaaagtaaatttgattgcacacaatgacatataaaaaaatattcttagcagctttattcagaatagcccaaattggaagcaacccacatgtctgtcaataggagaatgggtaattagtgatgcgtttatatggtataaacacagtagtaaaaacacaaactaccaatatatgtaccaggtacaaaagagtacatcctgtgtaattccatttatgtgaagtttaatagcagacaaaagtaatagttggtaataagaagttagagtaaagctaccttgggaggggtatattcttggaaggagcacatgggaatcttatgtggtgttggaaatgttctgtatcttgatcttggtagtgacatgggtgtatacatacatgaaaaatcatcaagttaagattaatgtactttgtatactttttatatgttaaacctcactacaatatgaacattattactattatttagcaacatattatatttaaaaggtaactcaactaagtgtaagtaaattcaaatcataagaccaccttaagctaagatataacaaaataaagatacgctaatttactttctcaggttcatatcttatattttactaaatatactatccagccccctctaatttgatagttgtttaacaggattgatattttatatatttttttccaaaatgcaagaaataattatacaaaaatctcagttcagatgaaaatgtggttcattttaaggaacaatggccccatgttacaataattttattttccaggtggtttgggaacattccatgcccttctaaatacagctgtacatgtagtcatgtattcctactatggactttctgcattggggccagcctaccagaagtatttgtggtggaaaaaatatttgacatcattacagcttgtgagtaattaattgtctttaaaaccatatatgaagcagctagagtcacttgttttcactgtgaattaggatactggttaaataaagaagaaagacaaaacaataggggtagagcgtctggcccctacatgatatgccatcatggttcttaatatgttagatgaactttggtaaccaagaggctcagacagttaaacaagcatgtgtatttttgtgccatctttatattatgcatttatacaagaataaatacatttgtgattaagataactccaacgttatgtgaccctcaataggcataatacctattagaaattagaaattccgttagatctaaatgaccttgagggaatgcaactttgagggaacgatgagccttcctgtgtgcttacctatatagtcccaacatttataagtccatcttccctccagtcaataaaaagcactgtgagaattaaaaacgtagagggttagaccaacatatatgtattacctaaatttgaatactgcccttatataagcaatgtttgaaagagccagaggcactcagtttagacctaataatgcattctaagcattaattctcaaaatatatgatatttaatttttttggagactcattatgggtttgagatgatgatttgctttacattttattggtgtctattaaaaggagaaatctgccacccttgcatttccacatttgcagtctataataaattgatgtcatattctgccagtaacaccaatgagaaagtatgaatttggtttagatggcgtggtgaagattaattttttattaaaatcctgtaacttcctacatgaaatttggcacattcatataatgtgttcttccaggtgagaggttgatattttaatggataaggatcctaaatcaagatcagagtatttccttgcagagttatttgttgtatttgaaattggcagcaaactaaatgaccaatcataaggatatggtaaaatatattattttaattcatactttgaaatactatgaagtcatgaaaattactcaccattgcttctttaaaaaatattattttctcaaagtagtatatgctcattgcaaatacgtgagaacacctaattaagcaaagagaaaaaaatacatggaattctgccacccagggataatcactgatatttttatttggttttcatccagtttttctctcaggcatatgtgtacaccttttacattttttgtatagtattgcatatataattttgtattttgtatttaggcttttttttctcagcatactcttaaatgtacaaactttttaataacgtgaaaaaatactgatgtagaaagaataggatggacattttttcatcatattctcaaatatgtctattatacacaaacatacacatgcatagaatgttaaggatatcgtttagccttcctaaagttttgttttctcttttggaaaatgagaggaataagtggctatgttgtgggaatgtcataaatatacattaagataatgcaaggaaagttgatgatgacaaggataaaatgataataaaataaactatatgaaaatcttaaccatgattttaactagacagattgtgagtaattgttgtctatttctttatagagttttacttttctaagatttccacagaacacatattgctttttaatcagggaaaacatgataaccagaaaatctgaatattagcctagaaaaggtccctcttgggactgtgtaagatgttctgccccacagagcccttgagcactactagaagggccaccagttctctctcacacctcgtagattctctgcctcagttggcagttcagacactttttttttttgagatggaatctcgctctgtcacccaggctagagtgcagtggcacgatctcggctcactgcaacctccgcctcccaggttcaagcgattctcctgcctcagcctcctgagtagctgggactacaggcgcgtaccactgcgcccggctaatttttgtatttttagtagagatggggtttcgctatcttgaccaggctggtctcgaactcctaacctcgtgatccacccgcctcagcctcccaaagtgctgggattacaggcgtgagccaccgtgtctggcctagacacatttttatctgtgacagtggaggacaagtggcaggtataaggactccgagatgctttaactactaaaaaattccaggggctctaagtaaaatgttattattttccaaaaattaaaatatctggtccaataacaggacagaatatttgaaattgaaatcatactgaaaaaataggccacatgtagtgcatggtcatttcatcatagtcaaggactcaagtcagagactgttagagaaaacctgctctgttgattctctgagtagtaaaaaggttgctgcactgcacagctccagggaacatttaaatatagaccctgcggttgtgcaattttgtggttctgaatagtggatccatacttccaactggcttttgacattataccacccattatcactctcagggaggctagatttaaagatggacttctttgcccaatagtgcactccctgcactttgggagtgcataaacataggtaggtaaagaattgttaactcttcatatctgaataattttttttcacgttttcatttcttaggtccagtttgttattgtcgccatccacataagccagttctttttcatggaggattgcaagtatcagtttccagtctttgcgtgcatcattatgagttacagtttcatgtttctgctgctctttctccatttttggtaccgtgcttacaccaaaggtcagaggttgcccaaaactgtgaaaaatggaacttgcaaaaacaaagataattgaagcccaacataagtctatgatcgaaactgatacattgtcttccttgacaatcaagagatatttacctatgcagtgcattttgtatatttttcaaaactaagagcttgtatttttatggtaagttattgggatgtctgatatttgagagcccgaagcttccagataacagtcttctgataattagagcctacagcagccagaatttgtttttgtttttgtttttgtttttttagctgcttttaaacctaatccaaaggttttgtttaaaacattttgttgcagtgaaaaaaagatatgaagcaatacagtactcttcaaagaagtccaataaagatgaaaaatatcattaggtattttgagcacagacggagatccatgtgataaaatagattccttctgctgggtctggaaagtctggaaaccacctgtaggccctggctttgtcatttattgactgtattcagaagatactatatttgctctagagttaactcccattttagcaagctagcacaggtgaaaattgagtgagtttttgataacttgtcatttaaaatcattaatgataattttcaatggatcttttcagtagccatcaccagttttgctgataagacttcctcacaacccatttgttgtacaaactgtttcaaagtagcaatcctttgggttagtacacttgataccaagtttcattcagttgattattttcaaaacaaggtgatttgttttaatgggttaatgaatactttgctattactgttttacaattaactttgtatatctctggaaagaggtgaatttgtcaatgaaaaaagtattgtgtagttcagtgggaaaaacctgttgtctgttatagtatcacatcactttcttacattgtcatggtttaaattattatcttggtgaaatatataggttagatacttaaatgttcatattattagcacactacaggtactacccttaaatcataaataatattacccattgtacacagtttccagatatgagttagagtggctgtgaagcaactagaggcaaattgtggcacagagaatatccaggggaaaattgattatgtaagcaagggctgttctactttgagagagagacagacagactacataatagtaatatattatataattaatgttatagatacactgaacaataaaacattttctggaattatgaattaattaacaacctggatttctgtttccagacctataaaccatgtaatgaaggactgaaattcgtttggcatacactttgtttctttaaaattgctagtttctttctgttatttttacattttcttgtcagagaatcaaaactattagtcagtagagttttgtccatgaaataatatttggacatttgtgaatttttccctattttttttcttcttttatttatactcaattttgaagcactgtttatgtttgtaggactttaaacaattagtacttaaagccccagttaattttgaacacacagagatacttattgtactctgtgtacagtaagtatttttatgtttacacttaccagattcataaggttatttgcctttaagtgatcttttgtgattttacttgattacagcatgagaaggtaaaggttgataaatgggagtaattacatatatatatataatttattatttttttttctgaagcagagttttactcttgttgcccaggctagagtgcaatggcacaatctcggttcactgcaacctctgcctcccaggttcaagtgattctcctgtctcagcctcccaagtagctgggattacaggtgcccgccaccatgctcagctaatttttgtatttttagtagagacagggttggccaggctggtctcgagctcctgacctcaggtgatcctcccacctcggcctcccaaagttctgggattacaggggtgagccactgtgcccggccataattttatatttttagaaaataaagaatgaaggacaaaagagcacagctaaatgaaactgctgctctaatttattccactggaaaggtctcaggactccttaactgttttccaggtttggctcttcatatctaacctgtgctaaaatgagaaggtatgctaggtgctgttagaaatcacaccatttccaaagaacccaagtagtatagagaccaaaatgaggcaaaaataaaagagatgaaacaggagagtttatttcttgcatactttccgaccttcatcatacaacctctcctaacctccctgtagtctttaaaatgtttaacttgcctataagctaacatgtaataaaacacatactcaattatatgaatagaagtggagagccagaatgctacaaaagaaatcacagctgctagaagtatcctccatagaaacatcaacatgattgtggatcaaaatgattttcactggatatggaatttgtatgggccatatttattaaaagagttctgtgtggtcacatagagttcctttgggatttcatcccacttttcaggacttaatttgtttgggtttgcttacctaacaagcaacaacaacaacaaaataaatagttccaaaatctagtttattacataaatctctatgaatccttgagggcctatatctatattataaataaatacaaatatagatttttaaatatctatgggactttgccatttacagccttaagtataaaattacgagattatattctttccattaccctttatttctgctaactttttaaagactggaacattctgtggatgttgtcaaagtttgagtttgtttttccctgtgtattataataaatttgtggtattgcatgta

SEQ ID NO: 707 - DNA, 1233 bp, Homo sapiens
actctcattccacgttcttaactgttccattttccgtatctgcttcgggcttccacctcatttttttcgctttgcccattctgtttcagccagtcgccaagaatcatgaaagtcgccagtggcagcaccgccaccgccgccgcgggccccagctgcgcgctgaaggccggcaagacagcgagcggtgcgggcgaggtggtgcgctgtctgtctgagcagagcgtggccatctcgcgctgcgccgggggcgccggggcgcgcctgcctgccctgctggacgagcagcaggtaaacgtgctgctctacgacatgaacggctgttactcacgcctcaaggagctggtgcccaccctgccccagaaccgcaaggtgagcaaggtggagattctccagcacgtcatcgactacatcagggaccttcagttggagctgaactcggaatccgaagttggaacccccgggggccgagggctgccggtccgggctccgctcagcaccctcaacggcgagatcagcgccctgacggccgaggtgagatccagatccgaccactagatcatccttataccgacggggaaacggaggccagagagggcgtgggcgcttgcaccacttccgtcccatccttgcgggtacctggctatgcgggggtgcctaaggagcctggaaaaagcgctcccccgtcgtgcttcctggggaagggggcgttcgctgcgctcggagcggcgtcccttccaacccgccggtctcatttcttctcgttttcacaggcggcatgcgttcctgcggacgatcgcatcttgtgtcgctgaagcgcctcccccagggaccggcggaccccagccatccagggggcaagaggaattacgtgctctgtgggtctcccccaacgcgcctcgccggatctgagggagaacaagaccgatcggcggccactgcgcccttaactgcatccagcctggggctgaggctgaggcactggcgaggagagggcgctcctctctgcacacctactagtcaccagagactttagggggtgggattccactcgtgtgtttctattttttgaaaagcagacattttaaaaaatggtcacgtttggtgcttctcagatttctgaggaaattgctttgtattgtatattacaatgatcaccgactgaaaatattgttttacaatagttctgtggggctgtttttttgttattaaacaaataatttagatggtggtaaa

SEQ ID NO: 708 - DNA, 133989 bp, Homo sapiens
actgggtagaatacttggggtgccagggaggcattaatgcgagaggagtcaggtgctcagtttttattggagttgggagggcagccccacatcaggaagagaacctgtttctgcaggatggtccggggagaagggaggactccacccaggcttgtgtttgccctgctctgtgtattcagccagcaggctctgcacaaggaagcaaagtgcagggagccaggctccaccgacagccaggcactgggcagcacgcactggagacccaggaccctgtgcaggagcagctccgggtgacacgaggggactgaagatactcccacaggggctcagcaggtaactgctttcagatcctttaggcatggctggagggtttgctgtttgtggtagacggtgtcatatagaggccaggggtcagacagggtcaagtttgatcccagctctgccttctgttcactgtgtggccttggatatgtgtaagcctcagttccactatctgtgaaatggacccaaagatagcactcatctcaaagtttttagttttacaaggagcaaatgacaatgtggtcagtgttaggcgcatagccacataaataactcctatttggtggaactattgagggtcatttcaagcacaggacatggggagaagtcactggatggagggataggctgtgtgatttggggatccgtcagggcaagaatgccccatagccgagtggaatctgagccttcacctcaggcattgcctaaagaagtgggaggacaagaaaaaggacttgtggagtgccttttgtgaatcttatttaacgctcaagaccaccctatgaggcagctgctgattcaaatcctggcttcaggacccctgctgtttacatctccctctgaaccagtttcctgcctggaagagtcattgcgattagaatgcgggtgcgctgcagccacaccgccagatgccagccccagctccaccctgggctggctgggtgccctggagcaggttccctcagccctctgggcctcagtttcctcatctgtaaagtgaacctaataacagtactgagatcaaagggctgagaggactctactgcccgtaaatacctgtgcacttagtaactcttagctgtggttcttgttttcgctgttaccatcgtctccattttacaactaggaacatgaagctgggtgaagagggagctgcatctggttccaggtctcatggaaaggatgctgtggaactggagtccagtcgggcctgggatgagggtgcagccagtgagactctcaccttgggcacgaaatgtaagggatgccaaaaaactcagtcatggagataaacggtatgttaacacaacatttttaaaagtcagaattaatggcaagacacccgtgatgaacaaactatgaacatgttacagaaagataagatcaggaacagcggtaattttgattttcacaaatttcatgttaaaatactattcatctccatggctgagctttttggtgtcccttacattgttcccccggagtccagggcctgatccgcctcagcctcctggggatcctgagctgatcacagcagcttcaggccctgggtgtatatactcagggtatgtagagggtgcttcctcctaaataaagacaacagacggggcggggcatgctaaagtagtttctcatttaagtgagggtgggggaacaaaccaatgtcccaaatcacagaagattctttttttccaaagagttctggaacccagaagggttttgtttttaggaaaaaggcatgagctttgggaaaagcaatgggcccgttaaagcccatggattctgcctgctttaccatgacaagagatgtggagggagaggaattgaaaaaggctttgggttgggggcgggggtacctttgcaccttgcaggctcatctgtcctgctggagtattagatgtgacttgattgtctctgtgtctgcagcttctcttcaagccaagtgccctgccctgaagcagttcaggatttgagtgcctgagtcacgtggacccaggttcaaaccccaggtgtgcctccccgtagctttctgactgctactcttgggcaagtaggactagtaaggtgcctaccctcatggaggtgacgttcgtgagatgaggggatggcattgctcagccttggtttctttatctgtgcaatcagggaataatgggactctgcaagggaaaaggagacaatgtgtgtgaagtgcctggcaccagggtcagggcaagggtgaagccagtgagcacctgggggataaaatgcagggaggcgctcactctctgctgccgattctgcaccagagatggttgccttcctatattttgtgtcctgctatgctcaccctggtgctgcctggcacatagtaagcctccaattaaaattacctgcgattatcatgcacttaacaatgtttggtgcaataataagactatgagagcgagctctaagatttttaggattaccatccgtttgtgcaaacataattaagtactccgaaagcaaaacatcaatcaccaagcagccctaaaacatccaaggtgattttgatcaaggcacccctgcccctggacccacaaagtcccataccaggaatcagggcttgggcagttcagtgaggactggatttcagttccctgtgtccccttgtacaggaggcaacctgtagcactgtacctggcactcctgataatagctgccgtgttcctagcactgtgcgggcacacacatggagctgcaggactgtggggcaggcaaagcggggttgttctttcctcctgcaaggtctttactgatgttgggggcagagggctggttctgctgggtgtgccagcctggccatgttggcgtcaccctcagctgagcagtgaggagggcccctgggttacctacattccattgcattgatcgaaggtgttgcttgtttacttggtgactaattctgtcaccattccacccttcaaaaccaccccccctcccattcaacagtcgtctagctgcctgctggtgatgaagtttcagaagtgctttctccaggccagcttgcatggggtttggcgtttggcctgtttccaggaggagggcctattattaatctgtaactacaaggaggcgacatggaccatcaatcactgtgtaaaagaggagggatttgagggcagcttccaggaggccaattcactcatggatcagaacacagaactaactcaattataacaataataagataaatgaataatattagcaataactaacgtttactcacctgagtactgccaagccctggcgctaaatccttacagtgattatcagtgacccttcaattgttcaatcctcactttatttgatttatttatttacttattgagagagtttcattctgtcgctcaggctggagtgcagcggtgtgatctcggctcactgcaacctccgcttcctgggttcaagcgattctcctgcctcagcctcccaagtagctgggattacaggcattgtgcctccacatctggctaatttttgtatttttagtagagacagggttgcgccatgttggccaggatggtctcaaacacctgacctcaagtgatccacccacctcagcctcccaaactgctgggattacaggcatgagccacagcgcccggcctaatcctcactttagattgtaccatatatattccttgcctagttataattttctcattgcaagaatgaatatgcaggaaatattttctattccatgttctattatattacatataaatatttcataaaactataacatcacttatacagcagaagagacagtagaaagtatgaaaatagaaaagttaaaagtctaaactctggacttgagtttgcgagggttaagtcctcattctcccacttactagaagatgatctgtattagtcagcttgggctgtggtaaccaaaacaccacagactaggtggcttaaacaacagtcatttttgttttctcatagttctggaggctggaagtccaatatcaaggttctggccgatgcatttctggtgagaccactctttctggctagccaacagctgccttcttgctgtgtcctcacacggttgagagagagacagagagagctctttggtgtctctttttataatgacactaattctatcagatcaaggtccacccttctgatttcatttagccttgattccttagaggccacatttccaaatgcagtcatattgcacgttagggcttcaacacgaatccaacacgaattttggaaggacacatttcaatccatagcatgatcttaagtgaggagtttaagttccctgggctcaggttctgcatctgtaaaatggggacaataaaaatacctgcctcggccgggcccggtggctcacgcctgtaatcccagcactttgggaggccaaggcgggcggatcacgaggtcaggagatcgagaccatcctggctaacacggggaaaccccgtctctaccaaaaatacaaaaaattagccgggcgtggtggcaggcgcctgtagtcccagctactcgggagactgaggcaggagaatggtgtgaacccgggagacggagcttgcagtgagccgaaatggcgccactgcactccagcctgggcgacagagccagacttcgcctcaaaaaaaaaaaaagaaaaaaaatacctgcctcatcgggttctgataaggaagctgtgagttaacacagagaagcattcagagcaatggctggcataaggtaggcgctacaaaaatattaggtattactactgctaatgtatggtccattttatttactgcttatactaacagcttatctctattcctcagctgctgtgcaccagccacccagttatacaacacatgggccacacccttctaatcttcacaggagctccacgcaaggaatctattatggtccttccctccacccctcacttctcagacacggagccagggcttatgcatatggccagggtgagccagaggggagcccaggcagagggcttgcgctatttcaccaccacagacgaatttactcacgtgcttttcagaaatgcagatccctaggtgacacctggctacaaacacgaggagaacatccccaagtccaggcactagagcagggcccctcaatatcagcactagcgaccctcagcaaagcagacaattcttcgctgggggaagggggcggtccttggcattgcagggtatgtagcagcgtccccagcctctacccaccggataccagtgcacgccccccaaagctgaaccgtgactatcaaaactgcatgcaggcatttccaaatgccccttcggggccaaaatcgctcctgactccagaaacgctgtgctccacttattgtgagggagaaacaaagaacagcatatttccaaggagaaaacgtttagcaaagcaatgtaagtcatcgaggaataggacaagatatccaaaatatgaaatatagatatatagtcctggaaaattggtaccaaaataaaataccctaaacattgtaaatatgttatatatatagtgtgtgtgagatagatagataaagtagatgatagatagatagatagatagatagatagatagatagatagatagatagatgatagatagatactcatcataaagttgaaatattgtcagtcgaaccatcatgagttgagtttgggacatctatatcactaatagctactaggtgctcgccctgccaggcactttcccatcacatttaccccttcgcacggtaccacgatgtatcaggacatgccactcaacctctctgtgctccggcttctcataagacaactgggaaaataaaagtacctaactcagagagttgttgggaggaccaagagaggcaaatatatgcaaatcagaactgctcagcacagagaaaacactctaaatgtgtttattattgccaccattatgaatactgtcattttccacaagaaagatactttcagaagggtcaagtgctttgcccaaagcctcacgatcgtgggattttacggatgcctgtctcactccagatctcttgttctcaagaggagagaggggaaccccagagatgcaggagagcgagactgcggagggcagcctccacccacctccggtggggcatctgggcttgcttctgaataaccagctggaaagcctgccctgcccgccagttctgggggaagggaagctggaggcccaggacagttctcttgatttgcaagctcacgaaacagtgcgtcagcaaagcagtgcccctagaagggttgtgagtgtattcaggtgcctgggtgatggtggtctgtggactccgaagcctgagctattcctccgtctgagaatccgtgggtttggttgtctaggtcagggtaggcagcagccaggagagttctgaccccaggagacactcactcactcaccccagaaatatccaaaacaggggctctcagccatggaaatcacctagagatcttgaaagtaccccgatgcccagccccaccccagagaatctgctgtcatcagtttggcaggggcctgggcatggggatctcagaactctgtgggaggttctcacatgcagcccagtctgggcatgggcccccataacacaggcaggaggcggggaagtgaaggggctttctcatctgaacctccacaatcaacccccagtggcaaagtgccaaaccctcaaacacaagtctaatttcaaaaacaacacccctccacccaccatagcttcgtatgtttaatgtaaaataaggtcataaagacaaaacactcatataatcagttcatgaaagaaagggcattttaacaccccattcaaactttttctttttcaaaaatgaaagttagctctttcaattgtacgtttatcatgaaaaactctatctgatttatttttctcctttttgagaaatgggagaaaactattacagacaagaattactgtctgaactgccttgagcctcagttttcccatctattaaacggggatttaaaaaaaagtctccacccaagtcattctggtttgcccagggttttccaattttaacataagagtcctgtgtcctagagcatcctcactcctggaaaaagcttgaagatggtcaccatcacactattttctataggtgtctgatcatgagaatcactggggcatttgctaaaaatacaaattccagggccccaaattgacttttcggtgagaggatcacaggaatcagaaatgttgctggattcctcggtagagtctcactaccgggcacctgtgggagaaactggcttcaaagagcaaggatcatacccgtgagagtcctactcatgctaactcttgtgcagtcctctttatgtgccaggccctgttcagggcactttgcttatattcactggtttgactccataccagccccttgagatggaggctataattatccccatttttacagatgaggaaactgaggcccagcgaggctcagtgatgctcagggattccaaactccagagcccacattcctatcctatgtgctacactgatgtctacatagagcttcagcactgggctggcatacggcaagctctccatacaagtcatatatggttatcattattacgagttccaggacctttggggcactgaaggagttgccatcttcttgccaactgtgaacagaaggcttcattgcaaaacatcaaaatgcttctttcagccttcccagttgtttggacctagtcctgtaggctgaattcatttctgctaatattgacatcagccaatagatggcagtaaccttttgcttttgtcccacccagatgaatcctgttctttaaaaggttgatggacaggcaggagcaatttcacgacacatgcattatatctgctggtggagagtgacaatatctgaatccaggttatcactgaaaaagacacgccattagattttccttctttcagggcccttcaccttgaagtggccgagaggctacttagggtgtgcaatgatcagaataatgtaaccccaactctgtgggaagaaaaatcttctctcctacttctgtacaccatgcgtcttccagcaccaaggtttttcataacctcaagtgttgattcaaagtagctttgttaggattgaatttacattaaatagtaagagctttaaaataaagcttgtaatcctactgttaaaataattttaaaacttgttaaaagctgaatttagatagagatactttgtgtgtatatattcttgcatgtgtatatatgaacgtatgtgtttgcgcgtatccttgactgagacatttaacctgcgtgcctcagtttccacaccagcaaaattgaaataataatacctctgtcttgttgaattgctgcaaagagcaaattagttttactgcaaataaagctcctagaagtttctcaacagatggtaagcactcaccaaatgttgttattgttattactctatcatttctatgattttttagagttgttgtcattgtttttatacacagtaggctcaaatcctggtaaactttctgtaaagagccagatagtaaatatcttaggctttgcaggccataggtgtctgttgcaactactcagttctgccattatagcatgaaagccatcatagacaatatataaataaaagggcatgactatcttccagcaaaactttatttatggatgccaaaatttgactttcatataattttcatgtgtcacattctatgattcttctaatttttttccaaccatttataaatttaaaactcatttttagctcactggcctactaaaacaggcagtgagctgaatccagccaccgctgttctttgccaaccctggtcttgaggattcaatattatattattcataatgtcccattaacagacagaagcgatgatctgatgcaagtgtgtgagtcacggattttataaatagaaaatagcacaaaacaacaagtgtcctacatgttttaacagtgctcagctttattatgtggtatgatcagaagacatacaaaatccccagatttggttatgtattaaattcctgcaagagaacacatggtgagatccatgaccctttttttggcctcctcaatatctaattgctcaatgcgtctactaccagggaataaaaactcacaccaatggcgagagatccacaagaatccctggtgactcattgactcctttcagccagaaatcaaaagtcctaatttttattccgagagccactagagcagataagccagaagctaggtctttggagatgggctacattggaattacatgtgcaaaagaactttaggtggcaagacagcaggcctttggagtggctgcaagagtccttgtgtagggatcagatatactaggagtcaattcctcactggatgtttgcccttggtgggtcttggaggttccattcctcctttttaagggaagctagtaatatgcagaacattccggtggttaggagcacagccagactgtgtttgaatcttgctcattaactgggtgacctttggaaaatgatttaaccccctcgagtttcggctacctcatatgaagaatgaaatcatgatacctctatctcacaggagtgctataggactacatgagacaatacaggtgaagcactccaaaattagagcttggaattgagaacatgctaagtaatgatttgctattatcatcattattattatatatcatacattattataacgaagctcttcagaggtttggtgatgatgtggtcatgtacctaggtctgtgcctcatatgtgagagatgctatcaatcgttattccctccattgactaacaataattaagctcccagtaaatgcaaacacactgctaagattaggagatacaaaattgggtgaaggtagacactgcctttgacgtcagggtgcttacaatttcttgtggaagggagacataaattaaatattcaactttgcccttcacctatgggacaataaccacattaacagtcatttcagaaccatcctacccagcagtgccacaacctgccatctcccatatgatcccatctcacgtaatgttattaattacttttattcgaccaggcgcagtggctcatgcctgtaatcccaacactttgggaggccaaggcgggtggatcacatgaggccaggcactcgagaccagtctggccaacatggtgaaaacccatctctactaaaaatacaaaaaaaaaaaaaaatagtctggtgttgtgccacgcacctgttatcccagctactcaggaggctgaggcaggagaattgcttaaacccagaaggcggaggttgcagtgagccgagattgcaccactgcactccatcctgggcaacagagagagactccgtctcaaaaaaaaattacttttattcataacttagaaccctatgcatttttgtttaataagcagatatgttttgcttaacatgagctagacattgttctaaccacgtcacaagcattaactcattgggtccttatagcagtcttatgaggcacagagaggctaattaactctcccaaggacacacagctacaaggggcagagagaggattcatgcccaggcagtcttgctctagagtctgtggtcataaccactgtgccatgctgccttgaactatcagaaacaacctcgtttgtggatttattgttcctatgttaactctctccctgtgcaccatacttcagctccatgaagtcagagggccttgcctgtttaatttacagctgtaaccctagtgcccagcccagcaacaggtgcagagctgtgctcaatagacacagtcatacactgcataatgataccttagtcaatgatggaccacatatacttagtggtcacatgacattataatactatgtatttactggactttttctgtttcgatatgtttaggtacacaaatacttcccagtgtgtcacaatttcccagagtgttcaatgtggttgcgtgctgtgcaagttagtggcctaggaacgataggttataccatacagcctaggagtgtagtaggctatactatctatgatgttcatacaaccatgaaatcatctaatgatgcatttctcagaacattttctcgcccttaagtgacacatgaccatatgtgctaaatcagtgaaagcatgaatatatacccaagtaagtatataattacaagccctgctaaatgctatgaaaaaaaaaaggccgtagtgtaaaaggttttaataggggaattaatttagtttgagaatcagaaaaaaatattattatttcaattaccctcattctaaaatcctaatagctgtgactttaactaaaagagaaaaaaatgctatctacactgaatacacttttcatgatgataaatattttcccctagcaatgaaatgcaactgaaaattatgactgcatttaactttaattctgttgaatacatgagtccaaaatctcctttctatttcccaaaataaatataagcaatgatatagtttggttgtgtctctacgtaaaatcttaccttgaattgtaatcctcataatccccacgtcaaggatgggaccaggtggaggtaattggatcatgggggcgggttcctccacgctgttctcgtgatactgagtgagtctcgcgagatctgatggttttataagcatctggcatttccccagctcgcactcattcttctggtgtcctgtggagaggtgtcttctgccacgattgtaagtttcctgcggtctccccagccatgcggaaccatgagtcaattcaacctcttttctttataaattacccagtctcgggtatttcttcatagcagtgtgagaacggactaatacaagcaatttgttctgatctcagctgatgataatacagccatgggcggcttgtcaggcctctgcaccttagtagcacatgtagcttcgtttggttttgatttctttctctcttcctctctttctctccattataggagcaatgggtaaccaaatgagtgttccccaaagagttgaagaccaagagaatgaaccagaagcagagacttaccaggtagtgtagtaaccattacaggggcatcagcagaaaaaaaaaaaaaaaaaaaagaacttcctgtatttgacaagtgtgttgactgaagtcctggctgctgattgattgtgtctgtgtgtgcaagacagtggagcgaggataacctaaaaggtgtcagaatcagcatattaaattcgtgctccagccctgacttgacaaatgcccatttgagcctggggtcccctccgtgcgacgggtcagagcttcctgtgagtgtggggtcccctgagctgaggcaccatggtgtgctctcataataactggagtccactcttggagtgagttattttggttctccaaggcatgatagaaaactggggagtttctagaaacacagcctttaagttaagtttaattttttgtgagacacccttgtatcttagaggttcttccttgagttcttctgattttcccccgaagatttgtctcacaatgccacgtgctctgtttcaggacaacgcgtctgctctgaacggggttccagtggtggtgtcgacccacacagttcagcacttagaggaaggtcagtgctactctgggaagggcatctaccctctcgtggggaaggggggtctgcagatgctgtttacggtgaaaaaaaaaaaaaaatgaaagggtcgaagccgcaggctcagtttgaaaatacttgcgtttgttccttgggctaccatgccctggtggcttaagcaacagaaatgtattgtctcacagtgctgaaggccaaaagttcaaaataaagttgtcagcagaattggttccttctgcgggtcatcagggagaacgtgttccacgcccctctcattggcttgtagatatggccatctcctccctgcatcttcatgtcatcttccctctatgcatgtctaaatttccccttcatcatatggaagcagtcatgttggattagggcccaccctaataacctcatcttaacttgatcatctgcaaagatcctgtttccaaataaggtcacattcacagggggttaggacttcagcatctttgggggcaatatgattcagccataacaacagatctcttctgagtgtgtgtgacagctggaggagactgaggagttacagcagataagataaaagcaatagagtgaaaacatgaagcttggcagacctaggttgcaatctctgccctgcagattactggctgtgtgacctggaacaaggcatctgcttttctcagcctcagttttctcatctgtaaaatggggataaaagtacctacctcacagaattgctatcaggattaaaggaggttgtttattaaacatttaacatagtctccagcgatatttcatatattccttttccccaaatgtgcacagcctctgccattatcagcacttaggaattcctcagaagctgataaattataaaagacaacagaattgtgtccacatgagggcagtgttaaaactgaggcatatacttacctatttgactttatcctggagtataagactgtatattcaatgcttccagggtggtcaggctctactatgtgacggatacatataaattatgtaagaagaggtagtatagcccagtagttgagggtaagaattctgcaatcagattgctagctttgccacgtactagctgtgtgaccttgagcaagttacataacctctctgaacctctggctcctcatctgtacagtgggaataatgacagtacttatagcataagcatctgatataatgaaagcacatattacagtgcctgactgataataagtgctcctatcattatcatattatggttatggttgttttctttcacatgtaagattctgggcttcagtttcctttcctgagtaatgaaggaggtatattacagcattggttccaaagcttttagaatttcctagggaatgtattaaaaattccatgccctagtctcatcccgtagctgctattcagaataccctaaagttggggactgagaacctgaactattgggggctctgtagaaggttcttttaaaaaaaaatcatagctttagggtacaagtggtttttggttacatggatgtgattatatagtggcaaagtctgggcttttaatgtacctgtcacctgagtagtatacattgtacccaataagtaactttcaccctcattccactcccaccctcccttctttggagtctccaatatccattatgctaccctacgccccggtatacacatggcttagctcccactttcaagtgagaacatgcagtatttggtttctgtccttaagttgcttcacttaggataatggcctccagttccatccacgttgctgcaaaagacattattttgttatttttatggttgagtagtattccatggtgtgtgtgtgtgtgtgtatgtgtatatatatattcaacacatccaccaccatacatagctacttttttgtttttgttgtagggtgtggtgaggacccttacaatctactcttagcaaatttcaagtaagcaaaacagtattattaacttatatttaccatgcaacttattcatcttatgagtgaaagtatgtaccttttgaccaaaattttccctggaccttagcccctgataatcaccattttactctctgcttctatgaattcaacttttttagattccacataaaagtgagatcatatagtatttgtctttctgtgtctagcttatttcacttatcctaaagtcctccaggttcatccatgttgtttcaaatgccaatatttccttcttttgtatgattgaataactattctgttgtgtgtgtgtatttacacacatgtatatgtatatgtgtgtgtccatatatatatttcctttttccattcatccactgatggacacataggtcattcccatatcttggctattgtgaataatgctgcaatgaacctggggctacagctaccactttgagacccttctttcacttttttagatatacccagaagtggattgctgaatcatatggtagttgatatggttttgctctgtgtccccacccaaatctcatttttaattgtactcccataattcccatgtgttgtgggagggacccagtgggagataattttaatcatgggggcagtttcccccatactgttttcatggtagtgaataagtctcatgagatctgatggttttatcggaggtttccacttttgcatcatcctcattttctcttgccaccaccatgtaagaagtacctttcacctcccgccatgattctgaggcctccccagccatatggatctgtaagtccaattcaacctctttttcttcctagtctcagatatgtctttatcagcagtgtgaaaaacagactaatatagtagttttattttttaactttcttaggaacttccatactatttcccataatgactacgccagtttacattctcattttgtcccaatttttaatcgggttgtttgttttcaattatcttcttatgtttaatatggagtgcaagggcaaggaatgaatagggaaaaattgttgggattgagaaagcctcttctctatccttctctccatcctccatctcactttctcttttctttcctctctcacctgtaatatatttatgttttttatatattatgcatgtgtgttaacatatatgagatacacatatgcataggtatatctcatatatgtgtatgtctcacatacatgtatgcacatatttgagatatacatatatatatgcatatttcatatatatgtatgtatattacaaagatgttcccaaaaggagggaaataggtttctcttgaaacgtaggacaacagtctgagacagcagttgccgtgtgaacacctgcacatgacgagggaaaagaaacacacatttctgagtcatgggttatttgtacctcgccctcacacctggcagtcttgctgtcaacatcctcagctactgctggagagtttgtaaagagtcccagttaatcccgaggtagcaattttgcctgttattcattgacatcttcaacctgtgaaacttgctttagagtgattaccccttttaagcttattgttgtcctcatgcagttttcctaaggttattagctaagttataattttcagtgcagttttaaggggtataaaagtgaaattctgggtgaccctttcttgtccttcagagagaattatttgaccatgtcttttgatgcacatttctattgatctctattggtgtatacatatatgtatagaggtatagaaaagtcattggaaaaatatgtaaatagaaatctagttgactgtttggtttctttttatctatacttttcctacttacaaaaattacaattaaaacaattcattggtgatacggtttggctctgtccccacccaaatctcatcttgaactgtagctcccataatccccacgtgtcatgggagggacccagtaggaggtaattgaatcataggggcatgtttttcccatgctgttctcatgatagtgaataagtctcacgagatttgatggttttataaaagggagttccactgcatatgctctcttgcctgctgccatgtaagacatccctttgctcttccttcgtcatctgccatgattgtgaggtctccccagccatgtggagctgtaagtccattaaacctctttcctttataaattacccagtctcaggtatgtctttattagtagcctgagaacagactaataccattggcatccaataatatttcctatgaaggcttatttagaagcagcaatggtaccatggctaagcaaacagccaaagaggctggaatgctacattgaatcatggctccaatatgtgagcttgggcaggtttctgagcttctttgttctgtcatctgtaaaatgggaattataataatgataggaccaaagcttctaagttattgtacggtttaaataagttgatactcctaaaactctcagaacagtgtctggcatgtggtaaacacataaggaaagttattctgtcttggatttaatgtcaattgacataaagactgccattgctatttgaagttaactgtattatttctgcctaacatatcttttggaactttaagatcaaaagttaaaactagtctttcctacatcccttatgccttgtaagtcttttatttgtctttcgatacaatgtgagagatatcaatcagggaaaatacctcttttaaactaaaacatgaaattacattctgtatcctcctagaaagaaatgtatcgtgtagagtgctttttcttagtaagagcaaaccaccatgggaatttgatatcaaacaaacattaagtaatacaatccatgtggattggagatctttctcaaaagtttggtattattattcatcttaagtaacaatatattaaaaaatcaaaatgtctcagtttttgcttatgttatatttctagcttaactcaccaattttagatgttatttgagtgtcccgttttggagtaggttgctaatgatgttaaaacaacataccatgtgatttacctgcaatgccactaagacaaacacatttgcttgcaaactttgggtgagaggcttatgtgcttgttctgccaaaatgcaattgtttaaattagtatcctcaatttgtctccatccttttcaaatagttgttttatttgaacccaaaaatatcttgagaattattagagcaaaatatctatcattagaagaacggataatccaattagggtatatccgtacaatggtctcgtaatctgtttgtactgctataacaaaatgccatagatctggtaatttataaaaagtagaaatttttttctcttagttctagaggctgggaagtccaggatcaaagcaccagcaggttcagtgtctggtgagggccctgttctctacttccaagatggcgccttgctgtgcccaccagaggggaggaatgctgtgtcctcagatggcagacacgacagaagggcaggaaagggactaactagttccctcaagtccgtttataaagtctataattccatttatgtggtctttgccctctaaactcaatcacctccttaaggcctcacctcttaatatgatcacatggtaactaagtttcaacatatgaattttgggggacacattcaggctatagcagatggtatactccttagcaataaataagaaggaactactgatcaatgcaacagcatggatgaatctcaacattattatactacgaaaaagaagccagacacaaaaggcaacatactacatgattccacttatataaaattctagaaagggcacaaatgtagtgacagaaagtagatcagtggttgctaggggctggggctggttgagacactcactgcagaggggcatcgagaaactttgcaatgatggagaagctttataccttcatcatggtggaggctacatgactgcatattttgtcaaaatgcactgaattgtgctattaaagttggtggattttattgtatgtgaattatacttcaatcagataaatctgatttttgtaaatgctgttaaggtacaatgaagttttttaaaaatcagcatagttggctgggtgcagtggctcacgcgtgtaatcccagcacttttggaggccgagacaggtggatcacctgaggttgggagtttgagaccagcctggccaacgtggtgaaaccccgtctctactaaaaatacaaaaattagctgggcgtggtgacacacgtctgtaatcccagctactctggaggttgaggaaggagaatctcttgaacccagggaggcagaggttgcagtgagccaagatcgtgccacggcactccagcctaggagacagacagagacctcatctcaacaacaacaacaacaacaacaacaacaaacaaaaaaaaaaccagcatagtcaaaagcagctcacatcaactaaagaaaaaaaataaattcaataaagaatggggggaaagatcatttgctatgttagaagggtgtcttctgctcaaccagttcttttgcttcctctggattcatcactgggggcaggaggagtctgcacaaaagaaagtaatgtgatggggaggtgttttgtgaagagatgacatctcttagctattttgtcagcccattcctcccatatactgcccaagagagggagacctcaggagactgtcatctggtacctcttcacctccccccaatacatgtggtatgttaatttattgcatctcattgaatcagacaacttcaagtaggaccacacttcacagttgagcacatcaccctcctgttgcgtacagagatcccctgttttgttcacatgcaaactttggtggattgtgaaggagaaactcaatctcccatggctcagagatcaggcagttagaaaggacagaacatttagtcccacacaccactgtcaggccacacaaaattaatcatcctagaaagagaatatgctgttccatttagtgaaacattaccacggaggtgccacaacccctattaatatgcaacaatcactttcccaccaataagaaaggagaatgacggctgctccttacctttttcactcaaaagctaaaaagagaagagaaagcctaagcctagagattctgggaaggaaatacctaaaaaggctttttaccaccttgagaatatagttgttttctagtttgtttctttgcaaaagacccacctaaagagatagatggccagtattagcataaaaccaagctctgtgagagtgcagctaatgctgatgtgatttagttaacatttgttcttcaataacaaaaacatagttttaaaaggcacatatgttctcaagggggaccccagagtcatcttctcactcaagcagagctgaggtgttggggagggacgcaaggggaggcagagcgtggacggccagggcaaagaaggcaggtgggcaagtgagatgacacgttggcctcgcaggtgacatccaggactagacgaggtaatgcattaagagctaagcgcatcccattcatgaaattgtaatatcactgacgtgtatctgtgtatgtactgtatctgtgctctatacgtaaaaagaatgagttttgttcatcctctcccatagaaccattttcgccctcttgggattaataccatccccactgagagtgcatacactagggagtgcaacttacttatgcaatttcttcatgtatgagaccacagagtattatagctaagagtccagcacaaggcacggtgcccttcctcccatcaaatgctcacatctaatcttcagcacctatgagtatgtgaccttacatggcaaaaggacttggcagatgtgactaaggaatgtgagatgatgatattatcctggattatccaggtggacccagtgtgatcacaagggtcttcatgagagggaggcagaagggttggagtaggaaaaggtgtgattatgggagcagatgtcacaaagagagagaggcttaaagatgctacactgctggactggaagctggagaatggagccacaagccaaggaatgtaggtgacctctggataccagagaaaagaaggaaatagattctcccctacagcttctagaagctgacccatttttgacctacaggcttcagaactgtaatatatttgtgctggggcatttgggataattcattacagcaatcggaaatggaaccatatcctctcaagcattggactctaacagacccaagcataggttttggctctgccactcactagctgtacaaccttggcaaggaagtttattctgagtctcatctgtaaaactggaataatagtatgaactttgtaggggagctctaaaaacagcagctggcacaagataaaagtgctgaaataaaggagtccgggcaaaactaaaagtagaggctattgggatgggtgcagtggctcacgcctaaaatcccagcactctgggaggctgaggtgggaggattgcttgagtccaggagtttgagttcagcctgggcaacatagagaccccatctctatttaaaaaaaaaaaaaaagtagaggctattttcatacttattctttaccattggctttccctgacatatcacctgaccagattttcccacctgcatattatttatgcctaaaacttcatagatctttggagaaataaaaatgcctgatttttggccttctttgattcctttctagcaaatttatgacattagttctcaggcctcactgctaacgtatggcagagactaagacatgccttccctgccaggacacgtcattttccagaaacagaaggaatgtttgacctggataaaaggtttctaaaattagtattttccttttttgctcctagtcattgttcctaaaaagaatagactaattttgcttttcttaaaaaaaagatgtaagtggaatcattttattggattgaaaattctaacttgagaaaagtgctcctgccaataacataatgagtgagaagagaagcatttgccaatatcaatgcctagtcaaagtggaatgggagacctgatgccaaaaagcatagctccctgatgtagtaaaaaatataggcaacagcacttgtctggaagggagcaaatacatgtgttctcctagtgtccactatttccctccaattgatcttattttttatctgtttccaaactcaagtaaaagtccctgagagcaggacgcttgccatcctttcttgttatgagggtcccagagctcagcacaaggcctgagatacactaaagacttagaaatggttgatcaatgaacagtggcatattaagccagtggtagcagaggaataaaataataaggccgaagggcaagttcccagactctgctgcactcagcttcaaggaatgcaaccctggataagtaaatagcacttttaatttgagcaagaagtctggaggtggcagttctaaatttggtacagcagtctgacagcctcatcaaaacaccaagtacatgagccaattgtgtcactcctgctcacaagatggctgtcacagaaccaaacatcacatctctacatcatgggatccaaaagcaggagaggaaaggccaaactttgccaccatttttttttctccttgtattatgcgaggaaggaggatccttccctgaagcctctgccaccatgtaggcatcctcttattggccagagctacatcacatggcccataccagctgcatgggatactgggaatcaagcatctctttgagatgcaagtgaataataataatacatggttggggctggagacgattggctattgggcaggccacaaacagtgtctgccagaggtgattccaaagaattattagaattgagcaaaggaaagtagttcatatcctcactctggcctttcaaaagacattaaggagatctaactcacatcctaaacaccacttttctctctcctcacattgctatatgtctctcactcaagaggctccctatcctcaactctccaccttgaaactctgtgagacaccccatcctcatgaggtaggggaatagggtctggaggcggggaagctaaggacttcctagaactaaatcaagcagaaaacccacaactttctatgctcaactatggatgtaactgcacttcagctatggcaggaaatatcctcttcatttgcatagggtgtacaccaagtaaataactttgtaacttcccttcatcctcttcatttacatagggcatacaccaagtaaccaatgggaaaccactagagggtatttaaaccccagaaatttctgtaaccagcactcttgagccacttgctcaaacctgctcccactctgtggagtgtactttcatttctataaatctgtgctttcattgctttgtgcattttgtccaatttttttgttcaaaacaccaagaacctggacaactctccactggtaacactcacaggcactctcctttcttctttccctccattgcactgtatcaccactgagtctaaagtaataacagagagttctgaacactggctctcccagatggcccaacagctccttgtgcctctgtcttccttgggagtgagcaagagccctggggaaatctcatccttctcaaactcagtgctttttctcaccaaaaagtctagtggagaattcctgttagataaaattatcttccctattgcattattgtggttgatagtctccaaagatgcacacatacaacccaccacgcaataacccatgcttcctggtattcacacccctgtgtagtcccctctgggctggtcctatataaccaacagtatgtagtagaagggatgacacaggactttcaagaagccttttaagaagactcggagcttctgccttgtctcttgcaacactagctctgagaaaggctagacacaatatcagaagttctaccctgagattgccatgctgtgagagagcccaagctagtcacatgaagaagccatgaggcaagagagaggtacccagccagttcccaaatattccagccatcccagtccaggaaccagacctgtgattaaagaagacatcatgggcatttcagctaatagatgccgtatgaggaaggaccataggaaccagcccatagccagaactaaagctccagacatatgtccctgtgtgagccgtcccagccatcttcatcctttcaaggcaccccagctgtggctccagacatcatagagcagaaataagctgatcctatcctctctctgcctgaattctttttttttttttttgagacagagtctcactctgtcacccaggctggagtgcagtggcacgatcttggcttgctgcaacctccacgtcccagatcaagtgattctcctgcctcagcctcttgtatagctgggattacaggcacgtgccaccatgtctggctaatttttgtatttttagtacagactggttttcaccatgttggccaggctggtctggaactccttgacttcaggtgatctgcccatctcagcctcccaaagtgctagaattacaggtatgagccactgcacctggcatctgcctgaattcttttttttttttttttttttgagatggagtctcgcgctgtccaccaggctggagtgcagtggcatgatcttggctcactgcaacctctgccttccagcttcaagtgattctcctgcctcagcctcccaagtagctgggattacaggtgcccgccaccacacccagctaatcttctgtatttttagtacagacggggttccactatgttgggcaggctggtctcaaactcctgacctcgtgatccacccaccttggcctcccaaagtgctgggattacaggcatgagccaccgcacccggccctgaattcttaatgcatggaatcatgacctaataaaatggtggttaagtcaatcattttggggatgcttgttacacagccatagataactgaaataactattagtatgcattttaattctttgtattttatttttacatgcatatatacttacatacataccaattaacatatatgaataaatgcaatcatattttctgttattgttgttttggtgaaacctgtctttttctttttcttattggcttcttcctcatctcacatcttccctaccccctccaaggacacccaagctaacaacctaatatttcttctttcatatttttctctttgttctatactttgtaaaagacaaatctgagacacaataaaatttcaaagagtgtatctgaatagaggcaattcattaatttgagaaaagaaaaccaaaagggaattagtgttttgatgacaaagcattacatgccagaattaagggaaaatgcagaggcataatataaaatgtgtttgatgtgttacaattacacagttgccttatttgatcatctcattggaaggtacccagttatataattttaagtttgttgactgtttctgattggttgagctcaagttctgtttttctttagcataggcatttacaagaaacagttcgagttgttttgcttatgtctgcaaatcaagcaaggtttagctcatttatgtggtctaacaggctttgtccgctcagggattcttcaggtctggtctttattttaatttactttaactagccccatacagacatttcccagcacatccattaatagtgtttgtttttttttaattgtaataatcttccccatctcaactccaaattcaactggtataactttaattcattttttttaaagctacaatgtacttcaaggtatagacatactataattcattcagccattatgctaattttgggcattcagtttttttcttatttttctctgacaatttttacctgggcgtaagttttttgttttgttttgttttttttttttttttgagatgaggtcttgctctgtcacccagctggagtgcaatggcatgatcatcactcactgcagccttgacctccagggctcaaggaatcctcttgcctcagcctcctgtgtagctgggatcacaggcacacaccaccacacctggctaattttttagtttttttgtaaagatgaggtctccctttgttatccaggctggtctcaaactcctgggctcaagtgactgtccctccttggcctcccacattgctgggattagaggcacgagtcacagcactcctctggcataagtatttttaaactcgtaatgtttatccaatattaaaagttatttggaatacacttagaaaatttctttttttctttttttttttgagacagagtctccttccgctgcccaagctggagtgcagtggtatgatctcagctcactgcaacctccgcctcctgggttcaagcgattgtcatgcctcagcctccctagtagctgagattacaggcgcgtgccaccgcatctggctaatttttgtatttttagtagagatggggttgcactgtgttggccaggctggtctcaaactcctgacctcaggtgatctgcccaccttggcctcccaaagtgctgggattataggcatgagccaccgcgcccggccggaaaatttcttcttcacatttttcaaaaataaaacattggcatttctgttttaaatttttaaggacttttttgtacttaccatgacagatactctggacacaacttactgttccatgactcatacagtctgattttaactgtcatgcaactgctgttgagtaatatgcaactttctctttgcctctttggatggagaagaaaacaaggcagcacagttgggctccaaagataaaaacatgggcagggtttcaagatcactcatctctgtcttggaggatagaccaagagagataggacagaccaagagacaacatgaaaaaaacatgaaaagagaaacagcattgagaaataacaacagctgcactcaattcttttcctcaaggtgcattttaaccagatcttgaaatagaataaacacacctacaattctaatcctagagtggacatttttttaaaatcagcttttcatatccttttaccacaccaaaaagaacttaccaacaattttcatttaacaaaaataaaaataatcagcgagatcaaagaaatggtaaggtgcgcttcaagtttctggaagtttatcaataaaagcagcatactgtattagtgggtaggatccattatatgcaaagcataccccaaagagcaaatgtttctgggaacaagaactgaaaaatgtaagcagagcctgcctccttgtgtgggtgcaatagcagtgcccaatagcagtgactcgcagagttgtccctgggccagcagcatcacatcacctgggtaccggttagatgtgcagtttctgtagccggagcccagacctcctgagtcagaaacacccccttccctgggggtggggcccagctatctgttcccacaacccctcccgggtattcttgcactagctcaagtctgaggaccatgtaagaactggctcaaggctctgaatgaaatggagtttgcagggaactggaaagcgtccttgtttatagggctccacacagcttcaaggatggctgccctgggaaaccctgagccaataataagatatttcaataacagcctgattttaggacttttaaatgaaatttcccaattcaaaaaaatataaacactgtgttggccaaaccatcagcagacctcatagttggcaacctccgatagtgtgaggtttatttttttccctacctcaaatccctctaaaaagatggctataaaaaaaatcatcgtcatcatcatcatcatcatcatcatcatcatcaagttatcatagcttcaagcaatgaaacattgaaatcctgtaaccaatttcagctgtgcttgcagatttgtgggctctccaggcatcctgcccgtcacaatgtgcatcccatctgtgttttccacagagagggacagtggtgggatgttaccagtggctggccccctttgcagctttctgtcacgtagtcttaagccagtaagttggctatgtggttaattcatgagtcctcttaaaaatgccttctgagagttacatcagctccaggtgatataaaaagaaaagctggattttctgaatttgccaagcagaggctcagactctgcaacatggagatgtccctaaggccatgacactctcagcaagcagggcccacctggcctatcagcccctccattcaaagctgatgctcattggttagaacctgcctcgctgctgggccagccctaggcaaattgggaaataggtcaagtgttcagtccactttgaatcccacctctcatttctagttccctactttcattttttcttttcattatttcttcatttcttaatggatggggtaggtgcatacacatagcaaacattctgagcgatatacataataagataaggcagagaaaaaatccccaccctaactctgatggctccccaagccccatcccaaatttccttccttagaagtaaatactttacagtttcttatatccagaggtatcccaggcatgtctatttataagttgtctcctcaacctcccgacaccattttttaaaaacaaatggaaacatactgtacgtgctgttgggcacagctttttctttccttactaaaattccttggggaattttaatgcctgtggaatatttcattgtagggacatatgattatttatttttttaaacttttatctaggttcagattacatgtgcaggtttgttataaggtaaactcatgtcatgggggtttgttgtacagattattttttcacccgggtactaagcctagtacccactagttattttttctgatcgacttcctcctcccaccctcaagtaggctcagtgcctgtcattcccctctttgtgtccctgtgtcctcaaggacatatgataatttatttaaccaggtttctactaataagcgtttaggtcatttccagttttttgccacaactacagtagtccagcaaatagttccatacgtaagcctttgtacccctatgcaattttatttctaggataacattttagaagtggaagttagacttacagtgtttgtgaaattttaagtattaatagatattactgagctattttccaaagaagtggccaaattacactcccaccgacgatctatatggctgttcttttttttttttttttttttttgggggagacagagtctcactctgaactctgttgcccaggttagagtgcagtggcacaatctcggctcactgcaacctctgcctcccaggttcaaatgattctcctgccaccgcctcccaagtagctgagattacaggcgcccgccactacgcccagctattttttggtgttttgttttgttttgttttttagcagagacagtgtttcaccatgttggccaggctggtcttgaactccttacctcatgatttgcccacctcggcctcccaaagtgctaggattacaggcgttaagccaccgtacccagccacagctgctctttttttatacgctttccactggggtcatcaattgtctcctttttaaccaatttggcaagggaaagccaagtgtcataattttattgtgcttttattttactatttatgaggccaaacatcttttcttctgcttaaaagctggctgcatgtcttttcctgtgaactcttcactcctatttgttgtctgtttcctacccccaccccttggtgctgtgttgctgtttatttatctaattcttctttttacaaattgaggtacaattcacctaccataaaattcaccttttagagtgacaattccgtgattttaaggatatttgcaccatgtgtgcaatcgttccacgtctaattccagaacatcgtcattactccaaaacaaaactccctaccctttagcgctgagttttttccctattcccagccactggcaaccactaatctgttttctgcctctatggatttgcctattctagacactttatataaatggaatcatacaatattttgctttttgtgtctggcgtctttcacttagtaccatgcttccaagtataaagcatgatataacatggatcggtgctttgtttcttcttatggctgattaatactctattatatgcaaatgctagatttcctttttccaattgatggatatttgggttgtttccacttttcagctattatgaaaatgctgctatggacatttgtgtacaagtttttgtgtggccatatgttttcattttcttgcttacctaggaatggaattgctgggtcttagggtaactccatgtttaacttttccaggaactgttaaactgctttccaaagcagctgcaccatgtcacattcctaccagcaatgcatgagcattccgattttttcacatcttccctaccactggttattgtctctctgattatggccatcctcgtgggtgtgaagacgtatcatgctgtggctttgactgcacttccctaatgagatgacattaggcatctttttatgagttccttggccattagtatatctgctccaaagaaaacactatcatcctgatttggctgctttgctgcaccctgagcctcttgtctctgtttcctggctaatttttccagagtctcaaagtaataatagtcaccctttggcaatcttctatgtgtcctgaactcaacctgccccacaaccgtatctccacagctgacccgtggtgtcctaacaactgaagccactgatagaataataggccacctcccctggtaagctgcttaccacttaaaaggtgcttgagacactcattgctgctggaaatgtgaatctgtagagcctttttaagaaaataatatggcagtgtctgtttttcaaaactaaatgcatattgatttgagggtaacacttctacatctgtgcctctattctatagaaatatagcaccagtttaggatttttgaacacgaaagtttattccactatagtggaaatggaaaaaacaatgtggaaactaccaggatattcattgattaggcaatggtttaaatatcttttggtatatccatactgaggaatattatgcagctattttagaagataagatagctttggagctattgactgtgaagaccaactataatgtacaaaagtcatcagaaaatatgtctaatgtgatccaatttctataaaaacaacaaggacagatacagtccctgtatatgtgtatctgggatgcttatacgtgtttgtgtgagtataaacaaagttcaatatgccacatcaggttgcagatgttatttatctggcaatgagggtggaggatagagacaggaaaaacaaagggttcagagagattaattattttggttgtaaacacgggttaaatgtacattattatcagatttataaaaaaaatcaaatgaaacatctgatttgtctttaaatgaaaatatatgctcatgttggagcaaaggctggttttgcatttgaatgagctttgcatattccagagttttgtagcacatgaatgacaggaaatatatgattaaagagaagagtggaaatcttgagtgtcactgtcagtcttgccccacagtatctgatcatcactgttgcttttagaggatgttttctgaagagcatgggggtagtagtacctttgcctacattcctttggaatccagcatttccatcactaaatgtccagacatgttgtataaagctgatagtcaagaattctaccatgatgttccaaaatcccatccttttcttttatttatgctagaatttcttggcaaagacattctggctttttaatgtacagatgaaaagcatgaaatgcgatcattcagtgaaagtttcaaatctaatctaacgtcttcctccaagtcataagtatctgccacgtgtaccctgactttacgacctttaaaacaacaaatgcatttgcacaacatagaaagccgcagttgtttgaagtgtcatttgactcttgcagcatgaccattgaagggtcatttttgcataattttttgaggtcttcataaagttttgagttttcccaaaggcctaacataatcttttgatattctaatataactcttttgaagaacttactgtgttgtgttgtccacttttccttcttcggtgatctgtgttaactttgccagatccttgtccaaccacggtcatgtgtgtgatctgagcagctcaccaatgttacaagactctataaacccctgcatcttttgcaagatgtacaatttccctttgcaattagtgtgtatatgtccactttatcctgaatcctgacagatcaggatattgatgcataggacggtgttgcttgcataggaagagatgattcggcggtgaataatgttcatacatggacactttgtaaataaaattataatgatagttcctgctttcccctttaaactgaaagcttggaggatttggataatgtattgtcagaaaaagaaatttcatccagcacaacattagtctcttctcagagactcagtttcccaacctgttcattggtgtgccctactacagttacaatcatggtcctttgtggagtgtttgctaggctgtgccccaagctctgtgcttgctgcttcacccatgtttcctggcttaatcctagtgtctagcactatgggaactggaatccagctgtaagcagagcagaccaagtccgggtccacttggggcttacaggtcgtggagaggaaacaagtgaagaagaaattaatgggatcatttcagagagtgatgaatcctctgtggagtctagagaataaacaggagtaagcaggaggggttacttcagatggaggagtcagggaaggcctgacataacctaagtcttgaatgataagaaggtaaccataggaagatcttagcgaaaatatttccagattgaaagaataactagtggtgagggctgcaggtggaaacatgttggtatgttgagaggtgtgaggaaaaacatagtacgagctgaagttctggagggtgtggcccatagtagagagtttggattttgttttaattttgtgaggcccttctttggatggttttatgcaaatgaatgacataacctaatttttatttaaaaccaaaaatatatagatatcaatgtttcccagatgtgagaaaacagggtttttttccccctcttgtacatagttttttcttgggtatccactaattctattaactaaactttgtctactttgttcatcttccctcccttctatttcttctttctcttctgttcctgctttggttaccacatgttgttgggagtttgaactttggaatcaggcaaatgtgggttcaaatactaaatctaccagtcattagctggacaacattagaaaactgacttgacttttcagagcctcagtttcacgacctgtaaaatgggagtgatgatagtacctaacttgtagatttgctgttatacttaaataaaatgtttcttgttatagacatttatccaaataaataaataataaataaacaaatgtcatacataaataaaatgcctcttgttacacacatttatcctaatgctgggaaacagtcaatgaatgttagctattgtttttacagcttgatgtcgttaggctttttgtccccacccaaatctcatctggaatttaatccccataatccccacgtgtcaagggagagaccaggtggaggtgattggatcatggggacagtttcctccatgctgttctcataaaagtaagtgagttctcacaagacctgatggtttcataaggagctcttccctgttcatttggcacttctttctgctgccttgtgaagaaaggtccttgctccccctttgacttccaccatgattgtaagtttcctgaggccttccctgccatgctgaactgtgagtcaattaaacctctttcctttataaatcacccagtcttgggcagctctttatagcagtatggaaatagactaatacacagctgtagcaagtgaaagttttagctttggcacatgaaaaaaaaaagataattcttcctcagaagttttgaatattgtaatacaaacgtgtgtgtgtgcatgtatgtttaaatatataattagaactctgatgaagcagcttgttttgacgagaatatttggtactttgaaaatgataaacatttctgaaacttgcctggcccagatacttatgtttcttaagataaattgatttatatcactactgtttttaaaagtctttctagaaaactcaagtttgtaaattaaactattggaataattcctttccttatggcttacatttaaaaatacaaaatggtaattatattaataacatattagtataacaaaaataactactgtttaccgaataccaatcatctaccagcctgtggtaagcactgtatgggcaatatttcatttaatcctcagaattaccctctgaaggaggcactgttattttcatgccaatttgtaagaaaactgaggcacagagacaggaaataacttacccgggttatccatttaaagagtgagcagttaagagtcaaagccaggttcctgtgatccacaatccaagttcttaacaattacacgaagatggcactggaaataaggttttaatcacatatacagataaaatgactttctttaaaaaaacatgcagcacaaaatatttttctgcactaagaaaatcaaaattttcaactctaccttctaaatattttggagctgctactgtcattcttgatttctttttaattttccttaaattctttgacttttttaaaaatgaaaagtaacatctctttggtatgtcatctttttgcatttttttaacttttattttaagttcaggggtacacgggcaggtttgttatataggtaaatttgtgtcatgggggtttgttgtcacccaggtatcaagcctgggtgatgaaataggtattattaatacctgggtgatgaaataatatctattaattatttttcctgatcctctccctcctcccaccttccaccctccaataggccccagtgtgtgttgttccccctgtgtggccatgtgttctcatcatttagctcccatttataagtgagaacatgtagtatttgattttctttttcggcaatactttgctaaggataatggccttcagctccattcatgttcctgcaaaggacatgatctcgttctttttatggctgcatagtattccatggtgtatatgtaccacattttctttatccaggctatcattggtgggtatttaggttgattccatgtttttgctattgtgaatagtgctgcaatgaacatacacatgcatgtatctttataaaagaatgatttctatttttcgggtatgtacccagtaatggaattgctgggtggaatggtatttctatctttaggtctttgaggaattgccacactgtcttccacaatggttgaactaatttacactcccaccaacagtgtataagcattcctttctctccactacctcaccagcatcttattttttgactttttaataatatcattctgactggtattagatggtatctcattgtggtttttgatttgcatttctctgatgattagtaatattgagctttttttcatatgcttgttgactacctgtatgtcttcttttttttttttttttttttgagacggagtctcactctgtcgcccaggctggagtgcagtgatgtggtctcggctcagtgcaagctctgtctcccgggttcacaccattctcctgcctcagcctctccaagtagctgggactacaggcgcctgccaccacacccggctaattttttgtatttttagtagagacggggtttcaccgtgttctcgatctcctgacctcatgatccgccctcctcggccttccaaagtgctgggattacaagcgtgagccaccaagcccggccgatttttgtatatgttgtaaggaaggggtccagctttaatcttctgtgtacagctagccggttatcccagcactttttattgaataggaaatcttttccccattgcatgtttttgtcaggtttgtcaaagattagatagttgtaggtgtgtggtcttatttccgggttctctattctgttccattggtctatgtgtctgtttttgtaccagtagtatgctgttttggttactgtagccttgtagtatagtttgaagtcaggtagcatgatgccttcagctttatgctttttgcttaggattgccttagcaattcaggctcttttctgggttctatatgaattttaaaatagttttctctggttctgtgaagaatctcaacagtagtttaataggtatagcattgaatctataaattgctctgggcaatatggccattttaatgatattgattcttcctatcaatgaacatggaatgtttttccatttgtttgtgtcatctctaatttctttgagcgctggttcattattctccttgtagagatctttcacctccctaattagctgttttcctaggtattttactctttttgtggcgattgtgagtgggagtgcattcctggtttggctcctggcttgactgttgttggtgcatggaaatgccagtaatttttgcacatttattttgtatcctgagactttgctgaagttgtttatcagcttaagaagctttggggctgagactatggggttttctagatataatgtcatgtaatctgcaaacaaggatagtttgacttcctctcttcctatttggatgcgctttatttatttctcttgcccgattgccctggccaagacttccaatactatgttgaataggagtggtgagagagatcatccttgtcttatgccagtcttcaaagaaaatgcttccagcttttgcccattcagtatgatcttagctgtgggtttgtcatacatggctcttattattttgaggtatgttccttcaatacctagtttattgagagtttttaacataaatggatgtctaattttattgaaagccttttctgcatctgttgagataatcatgtagtttttgtctttagttctgtttatgtgatgagtcacatttattgatttgtatatgttgaaccaacttgcattctacttgatcatggtggataagctttttggtgtgctgctggattcagtttgccagtattttattgaggatttttgcattgaagttcatcaaggatattggcctgaagcttttcttgttgtatatctgccaggttttgatatcaggatgatgctggcctcatcaaatgagttaggaaggactccctcctactcaactttttggaataatttcagtaggaactgtaccagctcttctttgtacaactggtagaacttacctgtgaatccatctagtactgggtttttttatggttggtagtctatgtattacttcctcaattttagggctcattattggtctgttcagggattcaatttcttcctggtacagtcttagaagggtgtatatgtccagaagtttatccacttcttctagattttctagtttatgtgcatagagatgttcataatattctctgatggttgtttgtacttctgtggggtcagtggtaatatcccccttgtcgtttctgattgtgtttatttgaatcttttctattttcttgtttattactctagctaatggtctattttattaatttgttcaaaaaaaaaacagctcctgaattcactgatcttttgaatggtttttcatgtctcaatctccttcagttcagctctaattttggttatttcttgtcttctgctagctttcaggtttttctgctctcagttctctagttcctgtagttgtgaggttagattgttaacgtgagctctttctaactttttgatgtgggatttagtgctataaatttccctcttaacactgccttagctgtgtcccaaagattctggtatgttgtatctttgttctcattagttcaaaaaacttcttgatttctgccttaattttattatttacccaaaagtcattcaggagcaggtcattcaattaccatgtaattgtatggtttcaagtaggacagtcctgtagatatctatcagggccatttgatttagtgctgagttagatcttgaatatctttgttaatttcctgtctcaatgatctgtctaatattgtcatggggtattaaagtctcccactactattgtgtgggagtctaagtctgtttgaaggtctccataaacttgctttatgaatctgggtgttcctgtgtttggtgcatatatacttaggatagttagatcttcttgtttaatttaacactttatccttatgcaatgcccatatttttttcttttaacctttgttggtttaaagtctgttttgacggcaactaggattgcaacccctgttttattctgttttctatttgcttggtagatttttccccatccctttatcttgaacctatgtgtgtcactgcataggagatgggtctcttgaagacagtataccaatggttcttggttctttatccagcctgccactttatgtcttttaatgggatcatttagtccatttacatttaaggttagtgttgctatgtgtcgatttgataccgtcatcatgatgttggctggttattttgcagacttgttatgtagttgctttacaatgtcactggtctgtgtacttcagtgtgttttgtagtgtctggtaatggtctttccatatttagtgcttcctttaggaactgttgcaaggaaggtctaatggtcacaaattcccttagcatttgcttgtctgaaaatgatcttatttctcttttgcttatgaagcttagtttagtcagatataaaattctgggttggaattctttttgtttaagaatgttgaatattggtcctcaatctcttctggcttgtagggttaccagtgagaggtccactgtaagtctgtgcttccctttttaggtgaccgggcctttcactctagttgcctttagcattttttcttacatttcaactttggagaatctgatgatgatgtcttggggaagatctttttgtggagtatcttactggggttctctgcatttcctgaatttgaatgttggcccctctagctaggttggggaagttttcagggatgaactcctgaaatatgtttttcaggttgattccattccctccatctctttcagacaccccaatcaatcatagatttggtaggcttgattgctgtgtatttacaagtgaaacagggactgaccaattccctggaattctctcaaagtcactgagtatgtattcaatttcaactggcgtaagttggggaagagtgatttattggcttatgtaatgctaaagttcagcttcaggcacagctggatctaaatgtttaaatgacatgattgggtatctgcttcctggatttccaggttctactttcatttgtgctgattctcaagtgtacctcctattggtttgcaactcttttttaataggagtatcaaaagttacaggacttatttttattagtctatcttatgtcaggtgcccacctaggaggtgagcatctgagcaaaggaaatagaagccccaggtgatggacttgggtatgtacccacctaaatttggagagcagagcttcagttgcatggaacgtatcaccgaagaactctaagttcttagaaattgtcaaaaacactttacccattctctgatatcaaaagctactgtttggatttgctataatcactaaatgcactgaagtctagtccagatacctggatgtaaggaatttattctttttcaaagcaacatattggcactttaaaataaaaaaggttgtccatggaaagtactttgtgttttttgaagactttttctctggctataacactcttacttaccactagctcctttgctttccagccagtgggtaaggaagagaggaattaaactgaaagatataagttggtgctcttggcattttgaaaagcccttccctgttttgaatcttagcatttccctttttgtcaaccataccctcttctcctggcatggaccattcccacaattcatttatattcactctgacacttcaacagccttacttgctaactttacaccctgatgcatccatctatcacttacttattctccctctttttttcttctttagtataatattttctatcattatgaattcctgaatcacagaaaaaaaggttaagaagagctagaagatcaatatgctggcagggtgattttcttcaggttcaggtttatgagaaacccctaacattcatccctgggcttgccccagaccatttcttcactgtgcctcaatgcttaatccagctcactctccccccttttttgtttgttgtttagtctagacactgcgagacactagagttgggcaaaaacaattgctaatggatgcatgtgtgtgtatgtgtgtgtgtatgtatttctcactacatattaatgagcagtatgaatagatcaaagaaatctcaattcttccctttatttttctgtcttcctgcaaacagatattaagaagtgtctgactacagatagagcaagcaaaatgcaatgttgtcaaaggcatgagagaaacctgaaaagttatcacagtatctgtcaattactaagcacttattatggaaaaggcgttgtgccagatcctttgcatgacttttcttctttaagcattacaacaaccctgcagtaggactaccaatattcccattttacaaatgaagagattcaaagatctttagtgatttactccatatcacacagcttatcagtagagaatcttgatctttaactgggatcccaacattcttggtgttctttttttcctgaatatttcactgatttatagtagggtcctagaaaagaaggaccttttatagttaatttaggtcaaggtagaggtcaaaggagaaagggtggatgttggaaacagtgcccttgcctggaggggttggagcctgtatccacacacacagtcttgaccagataaccctacacctttaattccacactggcctgaggtctaatttgccttcttgtgtggatatctgctcttccagcctttcaaagagaaattttctgagtactgtattttaaaaatcttcccatattcttaacagtctatgctaatacaagtccctggtaagacagagagcgcatgaacttagaagtcagatttctgcctgaagccagactctgctgcttactagcttactgggcagccaggggagggtgtactgacctctctgactgtcagttttctcactcatgaataatgataactaatgtttgtgatatttattaagcacttaatatattccaggtgctattgtacttgctttaaaactattaactcatgtaatcttcctaacaaaattacgagatttattatctgtctccttttaccagaaagttgaggcacagaaaattagataatctggattcaaaaagacatttcagctcagtgcctctcaaacgtaagagattttgtcctccaggggacatttagcaatgcctagagatatttttggttgccatgactgggaaatgtgaccggcgtctagtgggcagaggccaggatgctgctaatcagcctatgaggcacgggatgagcctccctaacaaagaataatctggcttcaaatgtgagtagtgctgaggttgagaaaccttgttctagctccagaacccaagctcctaactgctgtactgcctcccagttgacatcatgacaatatgctgctcacggagttcttacacagataaaagaagattaattaacattgaatatcactcattccacacctggcagctagtgactttccattaagtagctttccctcctcaccaaccttgccttctcctctcccaagaaaagcagggtccaaggagatgtagagagctaacttctgcctttcagaatgaccagagaacaacacagttccagtatgcagtatggcttttgtataaaaaatgtctggagtccattattagtgcctgaatttcccggcttggctgaataaccactgtttatgtttgtgtttacagtcgacttgggaataagtgtcaagacggataatgtggccacttcttcccccgagacaacggagataagtgctgttgcggatgccaacggaaagaatcttgggaaagaggccaaacccgaggcaccagctgctaaatctcgttttttcttgatgctctctcggcctgtaccaggacgtaccggagaccaagccgcagattcatcccttggatcagtgaagcttgatgtcagctccaataaagctccagcgaacaaagacccaagtgagagctggacacttccggtggcagctggaccggggcaggacacagataaaaccccagggcacgccccggcccaagacaaggtcctctctgccgccagggatcccacgcttctcccacctgagacagggggagcaggaggagaagctccctccaagcccaaggactccagcttttttgacaaattcttcaagctggacaagggacaggaaaaggtgccaggtgacagccaacaggaagccaagagggcagagcatcaagacaaggtggatgaggttcctggcttatcagggcagtccgatgatgtccctgcagggaaggtaagtgtgccaaggtgtatccacttggttctgaatgcatgctcgggggcgctaatgggataagaccactgcacatatgcagtcaccctgggcctaggcaaggtggcaagctgttgacccctctagaacaaatagcacattgcagcagagtgtcatcctgatgtttctctgggtagaaacttctgtgtgaagaacaataacagctgtggcatctgttttatgtaaaagaaaagaggaggtgagttacatgcagatgaatttgtccatccatttttcaaaggcggaagtagacaggttgcgtttacgatcagtggattctggaggaaaaggcattagtggaataaaaatgattcctaaaagatgttacctagtctctgtagtttgttgacatgcagagttttgttggaacacatttcgtcccttactgttaatagcctgaattgatatttaaccatcttttgctctaaggtgtgtgtttgaataaggagattttacagctctgggcagactcttttatgtagtaattcttttccaacaagtaggagtaataaacctttgtaaaaactaggggttttgggttttttttttgttttttggggggtttttttgtgttggttttcaaagaaggtatcctggaatcagttgctttttttcctgagcgaagaaaggcaagctctttttgacactaaaaagagcatttgcttttaaccttgagagagcctgtttgtattcaaggcaggaaaagaactccttaaaagaagaaggaagtaaaacttgatacattataggtttagggcatgcatttccttggttaacagactttttaaataacaatatttttcaaaacttgggaataaagttaagtgccactagcagacttcagagccaggaaaaaattggatgagctccaaatatatttgtcttaatacaatgcaactttgcacttccgaagtgctaataattacacttgctgtcatttattgaaaatgttcaatgtgccaggctctactctgagcactgtacgtaaattattttccttaatgaaaataagtatcacgttaatctatggttttaatgcatccagggtgctacgaagaattacattatgaaggctgggcaccgctgaacactctggagagttaaaattgggaaaagataatagtcatcatgtgttttaggctcttactgtcagcattcttgtgttttctatacattttgattcaaagagcttatttccaacatttctttcagagtttaaacattttcccttcaaacacccactttccaaaattcaccagttcaagaagccggttgaataactttccgtataatttaaaataagtctccaaatgcaccaggcatctgctctttactgagtgtgacactgtactaggaacaggtgaggcacagggaccacagtgaagggcgagacacagagtctcggccctggtggagtttgctgtccagtgagagaagtgaataaataaacctgcaattgcaatgcaagatgccaagtgctgtgctgggggagcagagtgtgggggagatgccagatgccaggagaactgggctccatggcccagggaacattccagcaaatgcatgaaccaggacctgaaagttacgtgcccagaggcggtaaactagtcgtcaatattcctgcatatgggagaaactgtttactacttgcgcctgagtggagaaaccattctcattattggtcataggcttctaaggccattttgaggttgtgattttttaacagtcatgtgtttgttttgcttgggcatccaaagcctatccattggctcagttaggagaagattgagttatttatgggaagacaatgaaggaatgtgttttactcatctttggacaggtgtccggtgactcatccaaatccccatcttaatcaagtaaaccagttcagcatagaatagccagccctccaatgtactcagccataaaacctcgacacactcaatctatttctagtctaagaaaagtgaggaaaagttttggagttgtgatttattaactcagctttctttattgaaaaagaactcttaggggtagaacctcaatttgagtggaatgtgttccaaaatgagatttgagtcagaaaatgggagcttgtgttaggaacatggcaggtatctaatatagcaaagcccttgtgtaatattttcaagttataatgatctctcagaagacccaagaattgtaactgtcttcctttctgaataagtgaattcactccctcagattcaccagtgaagtctgcatctgattttgttacatgacaaatttccatttttttcagtgatattgaaatttgaaatactgagtgcccactttgtactatgtacatgagaaacacagaaaagttatgaaatagccatttctccctcagcctgtgaacttatggatattcagatgcatatgcctgcaaaggtttttaacaacaacaacaaaacagccttctgattgtcaaggtttcttttctgactcccggctgcatagttctgtatttagggggaaaaaagcaattgttctataaatgtaatgggacaatccaaccctcagaaagtaacatgaataaaacttctcaatcagtggctttcttggtgggagtaccacattgtacatggctggatgtcagtgtattgattcagaattcttagggtgaattatgccttgggctcagccgcatctactgcctccctccagcagcccttccccccatttttatggcttgctccctgctggattggaattccagccacaagcccacagagctgtgaattgggagaaagatgccaccatttcatcctgggggaaacatacaaatcttctgtgttttcagaacgacaatcttatttttgtgccttataaaactacattcagggcaaagcataattaaaacaaggcaagaattcatgaacaaatgaagcgtttactacataggccaaagaaaagataaattatatgcctgaaaggtttcactgagctgtgattcatacaaaccaatgtgttggcagggatgaggtttttttcctctccccacaacaactgaaccagagctgtaagatatgcatttaaaagattcaacacacacacacacaaaatcacataatgcaaacttgacctttattggttaaaaataaaacccaccacatttctgttatcaacacagtacttccagagttgtgtttgtgttgagtgggggtgtggggcgcataaagtgttgccatgcagagtttcataagatgaagaatgtcttttttcttttaaaagtgtaattaaatcctgcaatcgttactttcgcactaaccttgtgcaaggcatttgaaaaataaatcatgtttctcgtctgtcaaggagtgtataatctagtaagagacatagtattttaagagacattgtgataagtgcatcggtcctcagattggctcaggctactaataataagaacaatattctgtgttttcacttctcttcttttctctcttgaacacactccattcaggctcttgtcacagccaccatgatgtttcaaattccctaccatcaccctggctgccaaatcctataggtctctatctttgtcctagtaggtctgacctgcaagttgaatccgacacagtgactgagtgggccacaccttgctgtttgaaacaacatccttccacctccctggtactcttccatcatctcctttgctggatctcaccctctaaatgttggacttccccagggttcacttcttggctatctctaactacgcttatttccttgaaggtttccctcagtcccaaaggtttaaatactgctatgggttgacaagttccaaatttacatctctagccgggatccatccctgaagtccagacgtgagtctcagctgcctcctcttccacatgtctacttgaatttctacatccccatttggctgctcactgagtatctcaaccctaatgtgtccagaatggaactcttcattcatcgcctaacaatgacaaaaacaaaatgcccaccagtttaattcacggggttttccatctcagtgaatgacaagttcatcctgtctctactgtttagtggtagaattggaattaaagaactaaggtctccagagtcctttcctacatggtatttagtagtgaattaaacataagcatcatagtcaagtagcctaggtttcctctctacctctgtcacctactggctgtgtgatcttgggcaagctacttcacctcctgagcctcagtttcctcatctgtaaaatggggataataatagtatctagcacattctcacattgttcacacttttagaagttaaatgagataggccatataaagtacttagcacaaattgcattttgaaagaagaaaaagagaaattagctattaccagtattatgggttttctccctgtcttctacttcacattttacttttattttttgcctttcccttccatagtcctcaacccaaactcacagagatagcacagttgactctaatttaagagttgtataaccaaaggcacaagtcctaacttgggtgagaaaggtataaaagttgtaaaattatttttgaaacaatagaaatgttagtgtccatgcccataagcctcagtttctttgtctgacatttaagggtttccacaatgtttcctctgcctattttccaactgcattttccacccttcccttaaatttctccagtcaatatggccaacacctgacctgtgcaaacgccatctgtctcctggtattttctctgcctatgtccctttctctctctgtttatcaaaaattgacttgatattcagtgccaggttctccatgaagctaaccagatatctccactcttggatgatttcggacagcatgaatccctctcgcattttaagtcaaattctgtgattaaatcattttgtagaaatcagctcattgagccatcaaatcttaccagggaattcctgtattttcaccattttacagatgaagaagtcaacagttcagagaaagcatatcactcctgacacacagctaaaaggtggcacagccaaaattgtccatctccaaagcccatagtcttaaatagtcaacgtttctatttttgccaattatttgaaacttgttcaatgaagttacaacttgaggcaatgaaattcaaagatgttagcatatgcaaagttgtaaatacccaaaatcccaagtgaaaaataaaaacaaataaaaagaattaccgaatttcaacattagaaggccaagtgaattattaactgttttttattttgtgttgtttctgccttatgtccacaaggccatgccttttcaactggtaaagagaactagccacccaaaagactttgtcagtgcaaagggaaaatccatcttacattatgcaagttttggagtaaacaaggtcctcagctataccactgggattttgatgcatttagcagtaagaaacgcttaatatgagatgtttgcagtggcagaggtgatgtggaagtgttaggagcctgggtgacctaggtatgagtccagactctaccactaaatagctgtgtggttgagttaaatgacaataatagccccattttaaaataattcattatttctaggctgtgcagtaagcattttgcatacattatctgtttttattgttaaaaaaacccaacaaggtaggtatttctattgccattgaacagaggagagaacttggggagaacttaagttacctgcgttaaggtcgcaaagctaattagtggcagaagtggaatcgagatccatctgtcacctaagcctgttatactcaatcatttaaaaacctgtgttttcatccacaaaaggaagctactacctgccctaggggtttttgtaaagttagaagataatataggccatcagtagtagtcatgctaaataaaactgtatattttctaaattgttagaaacttagaaatgagtaattatgaaatagatcaaatggcttttcagagtgatggagtttgaatagtgtatcatttaggggttggtaatatatcatttttactttggctgcaggaaacacacacacacacacacacaacaatcaattaatagtggttcacttaacaaggaggatgtactatttcttgcatgtaaaaagaaccctagaggtaggggagttcaggttggttcaacatcttcacagcccccacaagcccgcctcagtctttctctactggtgtcctccattgttgcttagtccctaggcttagtcccttgtggttttaacatgattccaagtatgcaggagtacctctctttattgtgcttcacagatgctgcatttttacacattaaaggtttgtgacaatcctgcatcaagcaagtctgtcagcaccatttttccaatggcctgtgttcactttgtgtctttgtgtcagcattttttagagataaagtttttgttgtaatttttattttaagttctggggtacaaatgcaggatgtgcaggagcccgggtgacgtgcacgtgtaccccagaacttaaaataaatgtgtgccatggtggtttgctgcacctatcatcccatcacctaggtattaagcccagcatgcattagctatttttcctgatgctctccctcccccaacccccgacaggccccagtgtgtgttgttccccttcctgtgtccatctgttctcattgttcatctcccacttataagtgagaacatgcggtgtttggttctctgttcctgcgttagtttgccaaagataatggcttccagctccatccatatccctgcaaaggacatgatcttgttcctttttatggacacatagtattccattgcagcactattcacaatagcaaagacatggaatcaacccaaatgcccatcaacaatagactgggtaaagaaaatgtggtacatatacaccatgagacaaggtatttttaaattaaagtatgtactttttttttagacgtaatgctattgcacacttaatagactccaggacagtggagaacttttatgtgcactgggaaaccgaaaaatgtgtgtgactctattgtgatattgactctattgcagtgacctggaattggacgtgtaatatttccgatgtatgtgtcataatgtcctataaataagaaaggagtttcctaaaatttatcctcagagccctttggtgaaattgagtcacgtgtctgtgtcaaggtgcaaatagctatcagccagcattttcagtttcttcagtagaaagaaggctcttccagcaaagaggacatgccacagatagaaaccagatttatcttctctacctaacattgtctggaaatcattaagtgaatggagcaagtagaagctgctacagtatccacctatggtaattcatctgagtgtatccattacattagttttctaatttaactgtgaccccatagtaagaactagattttacttgagctgatatacatgcgcatacatgaaacaaagaattcatgaagtaatactattcttgcagcatgtaacacctgcagggattttgtattcttttctattctgtttgatttgtttactgctggttttgacccactaccttatttttaaatctgctaatgatcacagtctgaaatttggagaacgctgttctgttatctgaccacttcgacacattgagacagttatcttaagagacgtgaccattttttatgcaactgagtattcccaatgcctagcacaatggctggcacatgttggcatccaataatgtttgttaaatgaacctgacaagaataagggtggtacacgtcatggttcaacttttcagactgttaggatgtattattgcaacgtcattatctgctctgcctaacacaagttgaaatagaaagtcattgcaaaatatgtggtgtatacgatttcacttaaactttagaatcatagtacaagtctacatttgtactatctacttggtattttaaatttggtctttaacatgtcatggcgttaatccattgaaatatctagtaaattgttttttgcaattaatttgtaaaataaattttgagttatcattccctctggtattgtcccatctgactcgccccctcagaagttgtaacggctataacttatcaagtttactaagtcacggagaggtaaagtaacttgtgcaaatcatagtgctagaaagtggcagggtggaaattggtcaccgatgcccacacacttaaccactgtgcctataggttcaaagagatgaaacactttaaaacttttgaaacatcttatatctttaaaaaattctaaagttagttgtattagtcagggttctccaaagggacagaactaataggatagacgtatatgtgaaagggagtttattaaggagaattgcctcacattatcacaaggtgaaatcacactataggccgtctgcaagctgaggaggtaggaagccagtagtggcagaagttcaaaagcctcaaaagtgtggaggccgacagtgcagccgtcagtctgtggccaaaggcctgagagcccctggcaaaccactggtgtaagtccaggagtccaaaggccaaagtacctggagtctaacgtccaagagcaggaagcatccagcacaggacaaagatgaaggctggaagactcagcaacccagcttatcccaccttcttccacctgctttgttctagccatgctgccagccgattggaaggtgcccacccacattgagggtgggtcttcttctcccagtccgctgactcaaatgttaatctcctctggcaacaccctcatagacacacccagaaacaatactttaccagccatctaggcatccttcaatccaatcaagttgacacctaatgttaaccagcgtgatagtactttccaagttggtctgtggaacgttagtccaataagatgggcctagaaatagggctctgctatggaatagtttcagaaaatctatttgctttatagtctctactgaagattcacaatggacatccacctactaaaggctctgagaagtcctgcagcaagcacgcctgtttcactttgtttaaccaagtgtttctcaaacttaatcatccatgtagctgttgggcctctaacaaggtagctcaattttccaaggaatggttcttctagagaacgttgagctaggcatttagaccagaagttgtatgatgttggctgtgggtttgaagaagtaaaataaaataaaaaacataaaccagaagttgaaaactagccatctgtagaaggcctctagccagagatgcatcttacttggcctacatagtgttttaaataatattttaattaattaattatatttttgaattaacaaagttgatgatattttaaagcaataatatgtcaatacaattctatatttcagacttccccataatgggtagttttgccctatatttccagacagaatgtgagttgtgactgtcccttaagatggggcacccactctccagttcaccaaatgattcccagcagcgcagccatgtaggttgtccttcgtcataacacttgcattggtatttttcttgggtacagttgagaatcaagtaaatacacccatcatggaccactttacttccttcatccttcatagcacttatcagaatttgaagctacttagatgaccatctgtcattccagcctgagagtcaatcaggcagccagtgttaagcaatatataaaaggggtgggaggctgggcgcggtggctcacgcctgtaatcccagcactttgggaggccgaggcaagtggatcacgaggtcaggagatcgagaccatcctggctaacacaatgaaaccccgtctctactaaaaatacaaaaaattagccaggcgtggtggcgggcgcctgtagtcccagccactcgggaggctgaggcaggagaatgacagagcgagactctgtctcgaaaaaaaaaaaaaaaaagtaagtggatactttcatttattcatgcaacaaatatgagtatttcctttgtgccaggaatgattttagattccccagcaggtagaacagtgtacttcatgggagctttccttctagtggagagaccaacaatttaaaaaagaaagagaattaacaagcaaacacttccagagtttagaaagagctctgagtgaaataaacagagttttgagatagaaagtagacaggagagtgaaaatcacaactgggtgaggaacagaaacagagaagtgtttaaacagtcagtgaatagcatgtgactttttctttctttctttgcacgggccaaacaattcttagaaagtctgcaacctaattctggcagcattcaaaactgttttctcgctttggggaagtgtttgttaaatagatgacgaatgtgttctaggctgtggattattagttttttgtatttaaaggcaggttttctggtgtggtttttgtttgttttttgtttttgtttgtttgttttccgtaacattgggtatttttcctttagtaaatgtgaaatgctgtcaccagtctggaaggttgtgcttgttaggaactaatcatggaacagaagaatcttccacaaatcccttttgcccagtgtggcttaccctgggaatcactcttcactcactctgcctgcagcagtatttttccattttaaatcacacatattggccgggcgtggtggctcacacctataatttcagcagtttgggaggctgaggcaggaggatcacttgagaccaggagttcaagaccagcctggccaacatggtgaaactccatctccactaaaaatacaaaaattagccaagcatggtggtgcacgcctataatctcagctactcaggaagctgaggcatgagaatcgcttgaacctgggagatggagattgcagtgagccgagatcgcaccactgcactccagcctgggcaacagagcgagactccacctcaaaaaaaaaaaaaagaaaagaaaaaaaatcacacataagggaactatacttaagagtgtgccaactcatgtgtccttaggactatccccaaagcaaagcctgctgccaaaagggaaacaagagaagaacattttattgcttaattctctacccacattttacttgccattggaactcaagttgacaaattcacttacccctcaagcagaggagttgctgagggagaaaagagaaaatgtacactagctttatatgggaagcaagtgtgcgttgctttcttagatagatttctttcccccctccccctatgtgaacaacagacaatgctttatttaatcttacaaatgtaacatctccacatcagttaataactatggattaatgatgatgtaccatgctaaggccctgggctagacttctgctacccccgtgtgagatgagccttaagtatcctgaggttatgtccacagggtagtaaaacaggtagtgatgttgtgatttacagtagagagtatcacactggataattggtccaacccggcttggttcaattagtataagcagctgaaattaacattgcctctctcttccccaaaagaggaagaaaaatggctaagtggaacatttttatatctgtgttatccagactcaatttccatctcagaaaagatgccagaggacaatggaaatctagatttcttggttttatattttcatgttattttatttccctctgaagtcttagataatttcttaatcaactacctggaccactaagaagcttgtttccaccgtggcgctttggcagtatgcaattttaaagtcttcaaacacacatgctttctgaatgagcaaatctgcatttaagaatttattgattgataggtcaggagggtgactatagtttactgtacatttcaaactagctagaatagaataagtcgaatgtttttagcatgaagagaagacaaatatttgaagtgatgaatatcccaagtacacgaatttgatctttacaaattacatgaatgtattaaattatcacacgtaccccaaaattatgtacatctattatgcatcaataaaaaatgtttaaaaataatgtattgagaacatgatcaatattttatgcatggggctttaaaaaatttccagtattgtctgtaagaaaaaaagctgaaatgatccaataggtctttcatattgattgtggcacacccttacactagacaccgtaaacgagggtgacataaaaatagaattggtcaggtgaagaaagtgatagtataatgttaaatgagaaaagcagatttcaaaatagcatgcagaagaatctcctctgggtaaaaatgatctctgccttcctgtgccatagctctgtcatcccacccaaagagcagcgtggaataaaaaattgcaaattgttgacagcagttgactttcagtaatagaataatcgatgcatttcgttttattctttgttatctgtattttctcttttttataaaaggagcactgtagtgaaccaccaatctaactaaaagtaaaaaaatgccaccatctaggtaatttctcgattcctcctctagactgcattaagaggctgaggattcctgagctgtgttaattagaaattgccacaggctgctagcaacagttcaacaagaggttattttcctctaacaataatttccaaactatgccacccagagcttatgtgacaattcattgttcagaaagaataacaactttttaaatatacttatagctaatgtgtaatcatctccagcaggagatcacaaagagaaatgttgtcctaagtgggcagatttgaagccctttcataattggatttcctatggttgtgctgtctgtgttctttccctgtttttgccatgggcttgaaagatgtgaatgcattataaaaaaaaaactactcattgaatttttatcagttgatgtgaattgggtaggagtagtggaaaaaataaaagtacagaattacctacattaatatatatttattgaccttccttcagtggctttgagcactgtagtaaaacaaacttaaaaaaaaaaagagtttgggcatggtggctcatgcctgtaatcccaacactttgggaggccaaggggggtggatcacctgaggtcaggagtttgagatcagcctggccaacatggtgaaaccccatctctactgaaaatacaaaaattagccgggcatggtggcacatgcctgtaatcccagttactcggaggctgaggcaggagaatcacttgaacctgggaggcggaggttgcagtgagacgagattgcaccattgcactccagcctgggcaacatctcaaaaaaaaaaaaaatcatagtctgcttaggaaattctgagattctgcaaaatatttttagtattggtcttcacattccttcctgcttgcatattaatttgctttcctttctaggcaaattgggggacaaattctatcttcaaaaattaaccaaaccctatttttcttcctgaatctgacaatggctacacgcaggtgacagtgttttcagaagaagaaaaatgaagacttcgtgattgtccagagactattgttgtccagcaaatcgaaccctctgtgctcgcgtgatattctctggggagaggaagcagagccttcccttttatcccaggcagcatggggctcaaatttctgacagatggaaaggagtggagtcatgagtttctgtaccattcaacatttttcacacaaattttcttgtgttcacctgtactttcagtactgattcgtggtgttaagactaagagtaaaatcagtgctacacaatgaggaaatctagatggagtagaggcatcacagatcattccagacaaggctttttaagccttatcttatattttcactttaacaatgtagatctgcttaaaggagtctgaagtccagctgacaatagttgaaagaaagtgccagaagttccatatgggccttattacagacaatcaaattatgataaggcggcattatttttcaacatgacaaattgtaatcactttagcagtgttcctatctgtttgctctttgaagccaacaaaaaagaaaatatatataaacttctcacacagaggtgaaaaacaagctaacaccacggacgcctgtttgcttaaaaacagtttccaggtattttctggagaatgtttctgtttccgtataatgttgtttgctgagaatgattcggaggcctgatgagaatagcagcagcacctacaaataacatgtttaaagcacaggccacacactggtggcctgaaggctggactctcatcacaactgtgcttagcttggccctcttgatgtttttaaatttttttagttaatcatgcatattttgctttagtcttaattttaatacgtaacatattcactctgttcaaaacaaaaaattataaaatgccacccagtagataattgctgtttgtatttttaatgtatctttctagggttcctttgagcatatataagaaataaaacataaattctttttctttcttttttacacaaacggtaacataatatgcactctgttctattccacgcttgttttcagttaacaatactttctgtatctgtagggagcttcctcacttgtaatgcctgcagagtattctgttgaatggttgtaccatgagttatttaaccaggaccccatttaatgcccattggctggcttccagactttcgctattaacctcactgcaatgaataaccttgtacatttgttatttcacacgtgtgagtttaggtttatcctctacatcaactcttagagatggaaatacagggtaaaagaatatatcctttttacagttttggtacacaatgccactctgccctccatcaggattgaattagtttatacttgtaacagcaatgcatgattgccttcttcacacaagcttggccaatgaatgtttttgtaaacatttggatttttttacttttcaatcttccttttcatgacttctggatttctagtcatacacacaaaagccttctcaatccaaaatgaaaagctgttttccatgtttccttgtattatttttaatctatttggattttatcctggtagagggttgagttgtgacaccaagttaatttttttccagatggctgctctgtttttcctacatcttttatttaaaagttcttcacttccatagattttaggtatcatctttatcatatactaaattcctatatgtctttggaattttaccaccttgttatcatcagccatacaacgtatgcatgtatgcctgatgctaacatatgttgtatggttgatggtaacatatgttgtatggctgatggttacaaagtagaaaaatatacagcagagaaaaggaataaagtggcaggaacttaaaataggaaaggacttgctgagaagataatatttgagtaaacatctgaaggaaaggagatagaatcagtgcagcacagcactgaaaaacctttggcctctgaaatcagctgggcctgggatcaaatcccaactctactttatgaccttaggcaagttatttattctttctgtgcattaatttcttcatctgtataattggaattacaaacagtgcatgcttcatgggatcgttgtaagaattaaacgggatctttttaacaagcttagcactgggcctgacacataaaggctgatcatttttacggttatcatggacacttattttgtcattacacactccttaaataattcatggctgcaaaatattccatcacacattgttatgggttaatttcacatgttaaaaccacatgcgaatttatttaactgcagatcccaaaagttcaactttttaagtggttcttcattgttgctcttccagaattatcctatcaagctttttttttttttttttactttttaactttgaaattattgtagattcacatgcagctgtaagaaatacaacagttatccctttatccagcgtcactcaacggtaacatcttcagacctgtagtgcaatatcacaaccaggatattgacaatgatacaatcaaatagagaacatttttatccccacaaggatactgcatactgactgttcaggtgcatccacttccctctcacccccatccttttcttacctcctgcaaccactagtctgttctccattgctatagctttattatttcaagaatgctatctaaatagtatcatacagtgggtacccttttttacataggcttttttccccttcagcataaatctctggaaattaatccgaatcactgagtgtcttggtagatattggtccttttcgactgccaagtagtatcccatgctgtggaagtaccagtttgatgtttggttgttccaactttgaggctattgtaaataactttgctataaacattaatgcataggtttttgtgtgaatataattcttcatttctctaggagaaatgaccaggagtgcaatcactatagttgcatgttttatttatttatttattttaagtttttgagattggatcttgctctgttgcccaggcaagtgcagtggtgccatcttggctcagccacccagggtcaagtgatcttcccgtctcagcccccagagtagctgggattacagacacttgccaccacgccctgcctgcatgtttaattatttaagaaactgtctaactgttttctattctgcctgtatccctttacatttctaccagcaatgtaaagtgattacattgtaaagtgagtaatcgagtttcttgcatccttcccagcatttaatagtcactattttttgctttaaccactttgatgggtgcatagtgatgtctcgttatggttttaatttgcacttttctaatggttaatgagattgaacatctttatgtgcttatttgccatctgcatatcctctgcaatgaaatgccccctcacgtcttttgcccattttctaattggattgttttgtttgtttttaatgttgagttttaagaatttttttcttttaaatgtattctaaatactagtctctcgtcagatacgtggtttgcaaatattttctcccactctctagtttctcttttcatctttttaacaggatcttttacagggcaaaattttttagttttgatgaattccaatttattatgttttctttttatggattttgcttttggtctttggtcttttatggatttttttaaccataggtctcagaaattttctcttatttttttcctaaaagttttatatttgaggttttatgtttaagtccacgatctcttttgagataatttttatataagatgtgagacttaaattgaggttctttcttttcctctatagatgtcaaattgctctagcacaatttgttgaaaagactatctttattctgtagaattgcttttacacctttgtcaaaagtcgtctgggcatacttgtgtgggtcttttctggcttctctattccattggttctatatgtctatgtctccaccaataccatacagccttgcttactgtagctatataacaaggcttgtgatcagatagactgattcatcaatttatattttaaaaaattattctaaatcctttgtctttccatataaatgttagaataacctcatctatctctacaaaatgtcttgctacaagtgctggaattttgacaggaattgcattaaacctgtatatcaatttggggcagattgacatctttactatgtgagtcttccaatccatgaacattgtgtgtctctccatttatttaggtctcctatgatttctttcattagcattatatagctttcagcatacaagttttgcacatgttttgtgagatgtaaaccttagtatttcattttcgtatgattattatggtattgtatttttaatttcagtgcccatgggttcattcctagtatatagaaatctagatcatttttacatgtttatcttgtattcttcagccttgctgaactcaattattaattctaggtgttattctgttgattccttgggattttctaattttgaaaataatgaaattgtctaattttgccatcttctctggggacagttttatttcttccttttcaatgtgtattccctatatttattttcttgccttaatatacttcctagaacttccactactatgtagaatacaaataatgagagctgacatccttgccttgctcctaatcttaggagaaatgcattcagtctttcagaattaaggataatgttagttctcaatttttattttgtagatcgtctttatcaagttgaggaagcaccctctgttactgtcttccttagagatttatcatgaatggaggattgaattttgttgaatactttttctgcattcactgttgtgatcatgtgatttttcttctttagtctgtcactattgtggataacatcaattgactttcaaatattaatcaagcttgcaaacctatagtaaatcccatttggttatgatgtatacttcttttgacatattgctgaaatctacctgctaatattttgtaaagaatgtttgcatctatactcatgaggcatattgatcagtagggtatttttcatttctttggtgccatctttatctgtttctggtaccaagtttttggtaactatctttataaaataaattagtaagcattccctcttctgttttctaggagatttcatgtagaattggtgtaattcttctttaaacatttcatagaattctccagtgaagtcttctgggcctgaagacttctttcctggaagtttttaaattatgaattcaattttcttaatagttatatggatatttaaatcatttatattatattgggtcagttataatagtttgtgttttttgagcaaatgttccattttgcccgttatcaaatttatgtaggtagcattggttatggcattctcctatccagttttgtacctgatactggtaatctgtaccttgactctcttgctctctcttttttgttgtcatctgttgtctctactaatagaggtttttgctgctgcttctctctgtctctcccattatgctgttgatttcactcactgggctttttgttttcattattatacctttcaattctaaaatttccattttagttatttttatatcttctatttctttgctggggctttctattttttcatttgtttcaagcactgttacaattgttaattgaagcattttattgtgactactttaaaatctttgtcagaggccgggcacagtggctcacgcctgtaatcccagaactttgggaggccaaggcgggcagatcacttgagtttaggaatttgagaccagcctggccaacatggtgaaacccatctctactaaaaatgcaaaaattagctgggcgtggtggtgcacacctgtaataccagttgctcaggaggctgaggcaggagaattgcttgaacccggtaggcagaggctgcagtgagccaagattgtgccattgtgccattacactccagcctgggtgacagagcaagactccgtctcaaaaaaaaaaaaaaatctttgttagataattctagcatctctgtcatctcatttccaggttgacatctgttgattgccttgttttattatgtttgaggccttcttagttcttggtatggtatgacaagttatcttcaattgaaatctgaccattttcatattatgagactgcatcttgcttaaactttctattttagctggctgtcccggacaccattccagcagtactggggctgctacctcattactgtcaggtggaggcaaacatccaggtttctcaccagcctccattgttggggggcgggggtatactccttattactactgggtggaggcgggagttttctgctcacatgaccttcactgataccacagtggaggtctcattaccactggctgacgctaactccactgggtctcttctcacaccaccccagtggggagagggaggagcatctcattgctcctgggtggggttggaagtccaggctccccatgtggtccccgcggacaccatggtggggagggcttattaccaaccggtgaggatgagaatcccagctccctacttagccccacagatgccatcttgcaggggtattgggataacctattacggtcttgtgaaagtggaagtctaggctccccacttggctttctctggcatgggagatggtgagaccacagaatgtcctgtggtatttggctggagtagtatggtcattgtctaaaagttttctgtcttgccagattgccctttcctggtcctttagtcagagagagtaggctttcggaaaggatttgtgagtatgtcagagcctataggtgtttccaggttgctaatttcttcaactccaagtctggggtacttgaggcaaaaagaaaacccaaggaattcaccatcgtgtttttcctcgggtcctcagctggtctgccttctcttctccacctttcagaatccttttatgtatgttttctctataatgtccagggttcttcattgtccttggtgagaggaacaggagaaagtgtgtgtgccccatcttcccagaagcagaagtcttatgttattttttaatgtcaatctaagaagaaaaaaaaaatatttcaaagtaagggcttaagttcaagctgagaatttcacctggaaaggccataaaactctcactcaggaagagccacaggcaaacctactccttgccctgggccggcagatcttgctcctccatagctactgtctgtccaaggcaggagacattactgcagttgggaaatcagggaagcagagaggctagagaagatgtcatggggcaatgcagaaaggcagcgggctcctgtgttcctggagttcttttgaactgtgtctgctccagtagggttctttctccaggttacggaagtactcacagctttcttcctcattcagagggcgtccatcatggcagatcctgatggccacctagatccatagggtccacttgatattttagtaattcctagtcccttcagctgacatcactgtattccattttgttttgagaaagttcaatagatatcccctgtatgtctagccctggaaccacaaaaaagaatcattgccttgcagccctttaggaaacccaatcaggacaggagctgcgggcaacctagacatagccccttttattttctgtgatgagcactggggagcacgtgggctgtcagaccggagtagctcagagcagtggacccaggctggggatcagaagagctacctccttgcctccacgccaacttcagagaaccttgcctactgtctaagtagccagcagcccatcacctcaccctccgtggccttgccttttcttttctccttagcagccctcaccacctgagtcatctgtgagatgtattagtttatctgtgtttttgtccacttcggttttttcccttgtgagaatttcagctccccaaggactgtgagctgtactctcactgcctccatcagtgggaagcacacagtagatatttgatcaaaaatttctctcctaatctttcatgacaccgtaggcaagtccccagacttgctgtgattcaaaagtcctgttcaatccaacttttttttttttttttttgagatggagtctcactctgtcgcccaggctggagtgcagtggtgcgatcttggctcactgcaacctccacctcctgggttcaaacaattctcctgcctcagcctccaccgtagctgggattacaggcatgcaccaccacgcctagctaatttttgtatttttaatagaggcggggtttcaccatgttggccaggctggtcttgaacacctgacctcgggtgatctgcctgcctcggtctcccaaagtgctaggattacaggcgtgagccaccatgcccagcccaatccaactttaaaactttaatcacacattcattataacattcatcccaattcctgctagaaccaagctctgccttgaccatggcctgaggtccttgcagtctggaagaagggggacttgctttttttcctcttctcgtcctcccctagtgcatgtgagtttagggaggaggggttaaggggaaagggctctaggctttttgccttgcagattgttctctctgactctccatatcttctccgttgtgggcatccacatgatgtttctcttcagggaataggtggggacttctccacttcaaaattatgtgatggaaccctctgctgcttctgctgctgtttagcccctttgccctgtgcccaccatcctggtaaggtagagtgaggctgcctgagcccaaacaccttccatggcacctactccttaaatgtcagtcaacacttcctcagtctgactccaaattattgttataaccatcttgcttttcataacccccatacctctgctgaactgaataacctgccccctaaaccctccccaaacccatccccacctcatctttttctgcatttctcacatgccttcctccatgtccacttgacagaaatttctccatcaccatcccgcattcctccctgtttctgcgagtctacttgcaacctatgctccatggccttggggaaatgctgcttcatcttcaagtctccctctcccttctagttcagtcactcttgaccttggtgcacactggaatcacctggggaggtctaaaaatattgacatctgagcctcgcctccaaaaagactaatgtaattggtcggggtggaatctgggtattggcatttgtttaaaaagctgcccaggtgattctaaaatccagttatgctgagacccactgggctgatgaaattaacttgtcttttttttctttttatcttgagacagggtcttgctctgtcacccaggctggagtgcaatggcacaatcatagctcactgcagccttgacctccctggctcaagcaattctcctgcctcagcctcccaagtagctaggaccacaggtgcatgccaccatgcctggctaatttctgttttgttttgttttgttttgttttgtttttgctttgtttcatagagacaaggtctcactatattgcccaggctggtcttgaactcctgtgttcaagcaattctcctgcattgacctcccaaattgctgggattacagatgtgagccactgtgcttagcctcacttgtctttttatcagagtacttgtccctatctactgacctttatccaccataaggctccaagcatctaggagagaagacagtgtcagattcatttttgtaaatctcacagcttaccacagtgctcagtaattaaattaaacacaataataatagctaaccattactgaatgcttcctctgtactgcacattctcctaagtcctttatatggattatcccatttactccctcaacaaccctaaaaggcaggtgctactcatcaccccacttttacaaatgagcaaattgcaacctagagttagggaaagtgcagtactgcagaggtgtagatggcagagcagggattggacctgggcagctggcctctgcacagcttgtatgtagtcacattgagggttaggatttggggagacacaaactttaagtccacaatacacagtgaaagcataacttcagagcccatgctaatgctgtgtggcctctgcacagcttgtatgtaatgtaactacccccacatagttactgagtgaggatgaattcatgaatggtgctcctgggcaacaccttacttaggcctgtggggaatttctcagtctagatttatgtcttgtgccactttcataatgactcatcttcaagacacctgttcagttattcatgtaatagctttatttaaagtttactttatattgaacttcacctacacaaaaatatccataatatgaaaaggttgatgctggacatatttttctagtgcacattgtcttagttcaggctgctatcaaagtaccatagactggatggcttataaacaacagaaattgatatctcacagttttggaggctataagtctgaaatcaagatgccagcatggttgggttcttgtgaggaccctcttctgggttgcagatggccagcttctcattgcaccctggaatgatggaaagaggactagaacgctcgctggggtctcttttataagagcactaatcctattcatgggggctccaccccatgacctagtcatctccccaaggccccacctcctaataccatcacatcagaagttaggatttgaacacatgaattttggggagacacaaactttcagtccacaatacacattaaaagaataactgtgtgtgtgcgcggacataccacctaaaataaaatcgccttcctcatacgtatatcaacactcatctgctataaatagaatttgcagccatccttctaatcaaccagcttaaccgcttggatcccagttatacctcagagttagtttttaaaagttcaactcatattagaacctgtttttaaaaagtacatctcttccaaagcaaaacacttttctcccagaattaaccagaaaacctaacaagactattaagaccatggcttttatttgcttttagttttatgaagcttcagctgctcatgaggcatttcacaagaaatatgcttccatttagaaagagtcctggggctgattgaaacccttgtagaatatgtgtattattgttacttttaaaatactcaccaaaatgtgctttttgtatttttgcagccatttcacaaaagccccatttttaatgcaaactattccaacctggcctttggtgttaggctggtctaagtgcataatctaagtaccaactgagtgctgagaactgtggtatagaaattcagagaaggggacagagtccatgggtggcctgacccagaaaaacgtcggtgggagagggagacttgattccaatcgtgaagaatagatttcaaaagggaagacagaagctggagagcacagtgtacaaaggcatagaaaaaagaatttactccatatcctttcatcctttaacaaatgtttctcctgaatctactctgtgtcaggaactttgcaaattgtatggcattttcattgcttttttttttttttttttttgtctgtttggctaacatttattggacacttctatactaggcattatgctaaggaatttacatgcattatttcttatggaaactcacaacgaattataccaggcaaggtttattattaatcttgtgttccatgagacgaccttgtctcagagaggctaagaccccagctggggttcctcaacctgtgagtggagctgggaggtgaatatggagtctttgtcaggcactggaacttttatcaaccacttgatcttgttgtgaatgagacacacgcagtgcctgtcctcaaatgcccagttgagcaggtgatactggcaattaatcaattatgattcagtatgatgggtactgatgagaggggaattaggaaaacaaatagcagtaagagataatgagcttcaattcttgtttgcaaaattactcaattgaatatcagtctatgggaaagaaagagagattgatcattgacattcattcttcccttcatttattcatttataaataatgttcataatcattatcactaattaatataaaaagatctgctacacccctagaacaagatttattattaattttggtgacaaagttcatatttcaaatacacttattaatttcaaatttagggagctcacttcttttcagacctgatttgatcctcattgctgttcacatgataatgtagctcaagattcatgcatcaccaaaaacgaactcacctgtagccagctacaggaagtcaacactctctactattaacagagtagaagctttcagctaagggagagttacaggaactggctttgccctcttgcctaaaacagatgaaaacttggacaaaaaaaccaaacaacaatttttaagactgttttaagatatcaggcaacaaggataggtgttctctgagagacgggacataagagataatccctgtgtctgctcctacctactgccttgagagggtttccagcccatagcctaggggggaggaactgaggcagagcccagcaggctccctgagcccaaggtggccagagttcatagacaaagcatcagaggagagagagagatacacagagagcaaactccaagggtctgtcaaaggtcctcacatagtatgaggcagagagctgaccaatatgttcatatgaggaaactagcaaagactgaagggggaaaaaaaaaaaaccaaccaccagaaaggcatttacacagggccagagagagtgccttctctcaccagccagactagaaaacctcattattaataaggcactgggtagagtagtcacagggtctttcctcattagcgagaaaatattagcttcctagactagacacgattttggtcctacctaatgtaactgccaatgggttatttttgcccgctgcccagacagagccaatttatcaagacaggggaatggcaatagagaaagagtttactacacatagagccaattaaatgtgagattagaacttttttattactcaaatcagcttccccccaaaattcagaggctagagttttttaaggtcagtttggtgggcagattgctaaggcgtggagaatgctgattagttgattgggggcagaatcataggacatcagagatgtcctcttgtactgagtcagttcttgggtgggggccgcaagtccagatgagccagaccagaatgcagggtctgaaaaatatctcaaacaccaatattaggttttacagcagtaatgttatccataagaacaactggggaggtgaagaatcttgtggcctctggctgtatgactcctgagccataatttctaatgttgtgtctaatttgctagttttacaaaggtggactggtccccaagaataaagggggcttgtttggggaagggactgttattatctttgtttcaaagttaaactataactaaattcctcccgaagttagtgtggcctacccccaggaatgaacaagggcagcttggaagttaaaggcaagatggtgttggttaggtcagatctctttcacagtcataattttttcactcataatttttgcaaagtcagtttcacgaacaaatcttaaaagccagaactaaaaggatcaaactgattttaagtatcttaactacctccaaaaacaaagttcaaaaatatttataggaacaaaaaatatccagccacccaaacaggtaagattcacaatgtctgacatgcaaacaaaaattaccagggaagcaaagaagcaggaaaatgtaactcatgatgtgaagagaaatcaaccaaaacctacccagaactgacacaggtgttagaattggcaaaaaaataaaaaggattagcataaatgtgtctcatatgtttggaaagttaagtagagacatagaagatatatttttaaaatccaaatcaaatttctagagataaaaactacagtgtgtgaggtaaaaaatacactggatgacattaacaacagattagacaatgcagaaaaaaaaattgtgaatttaaatacacagcaatagaaactatccaaaaggaaccacagggcagtgggtgaaaaggaagagggctttttcaaaaagaaggaagaaaggaacattaatgagctacaggataacttcaagtaggctagtaggcaggtaattggagtccatgaaaggagagaaaaggagagaagaaaaaatatttgaaatcataatggctaaaaattgatgactgatactctcacttggattaaatcatttgttcattcattcactagtaatttttgagattgtaccatgtgcacaagtctgggtgctggggaaacataagggagaaaaagaaccttcattggtttctattccagtgaagggagaggaacaaaacacaaaatgacaagtgagagttttaatataattctcagtcttgccactgagagccagataactctttgtcctgggcattgcaggaattttagcagcatgcctggcatctatcctccagataccagtggtaaatcactaacccgctactcgtgacaatcaaaaaaatgtctccagacattaccagatgtccttagggggaagaggagccagtaatatattagaagtgaaatctactaggagaaaaataaagcaattagcagcatcagatatgccgggatatattatagcaacttaaagtagagtggtaaagaaagacctcgatgaaaacgtggccattggctcaggcgcagtggctcatgcctgtaatcctagcactttgggaggccgaggtgaggggattacctgaggtcaggagttcaagaccagcctggccaacacggtgaaaccccatctctactgaaaatacaaaaattagacaggcatggtggcacacactgtaatcccagctacttgggaggctgaggcaggaaaatggcttgagccagggagacagaggttgcagtgagtcaagatcatgccactgcactccagcctgggtgacagagtgagactctgtctcaaaaaaaaagaaaaaagtgacaattgaaaaagacttgaaagaagtaaggtcacatgctcctggcaggcagaagctcagcccagatgcaaaggtcctgaggcaacagcctacttgacatgttcaaagaagagcaagcaggtcactggggttacaaaagagtgacccagggggaaaataaaacaaaaaaaaacgggcaggaaagcaatgagaatggaatggaagaggggcacttctccaggaatgagcaggagggtcctgttgtcacaaggagtgaggaatgctacttaggcaaaaacaaattaatgcttacgcttgccaactgtggccttggacatgatgtttaaacctctttgggcctcagttttctcatctgtaatttgccttgcacaatcttggcaaagattagataagatagatttgtgaaggcacctcgtaactgtaaagctatacaagcataaacaagcattgtttaagacgtaaggatgacatggtttaaacaagttataagtgcagtactttttgggagagttaagttatgaagggtttttactggtggaatttatggatgtagtctatatttatatacactccctatgaggatcttggttttccaccacctggatttaatttatatgatgttacattttactgcacacactatataagtttagcaaagttgacactcatagccaaataatctatagaattttaagatgttcagttctgacaggcctgacttataatccccatattggcctctctcaagctgtgtgaccttagacaagtaacctaaactctctgagcctcatttcattgtttgaaactgttaattgtaatatttgtctcagaagattgttgtaaagattaagtgacatatgtttaatgcatttatttgtatagtggtttgcatgctgtaaatgtaaaatatttgacgtattggcattgtatattattctataataaataataatatattaagattaagcgaccttgttcaaattatactagcttaggaaagagaaagcactggtgtacatgtaatgcttaataagtagttgacgtaatttgcacatctgtccttacctaaatctcatgttgaattgtaatcccctatgctggaggtttggcctggtgaaagatcacaggggtggatccatcatgaatggcttgggccatctccttggtggtaactgagctcttgctctatgttcacacatgatatggtcatttgcaagtttgtcccaccaccccctccactctttctctcttgctcctgctctgaccatgtgctgtgcctgctcccacttctccttccgccatgattgtaagcttcctgaggcctcccagaagccaagcagatgccagtcccatgcttcctgtaaaggctgcagaactgtgagccaatgaaacctcttttctttataaattacccagaatcaggtatgtctttataacaacgcaaaaaatggcccaatacaatcgtccattaaaatgagttgaattgtatctcagtggttgggatagtcaacccatatcaatttatactgcttgtccagacactgccaaccccagaggagaaagtataaaatccaggagtctaaatgcagtgccaccatatcccactctccactactgagagaaggggtcaaaatagaaataccaagtcttctgtgggcttctgccacctcacacactgcgaattgttagaaatcgcttttgaggaaacagaagtgtctcctttcattctcctctaagtaagggaactggcagcatgggggcagggagatggtgtggagaaggcggaacccacagccctgggatgaaaggaaggactacacggggatgaaagggagggcgaagagtgaagacgatgctcaaccagcaggtgagagtcgagtccgcctccctcactccacccacctccagaccaagctccccactgccaggccacaaccacatgcaccaacctgcccagcccggatacgttttaggtctcacttgtcacaacctccggtgcaccaaacagcttctcagatgcaccgatgtacctgcaggacctctctgttgaaaccttctcattttttgcaagaatattcatcaagtttatataatttgcatacctcttgacccaaaaatttcatttttgataatttacccaaagaaaatatagatacatgagtatttaaaaataaaagtgtgagatgatcactttactactgcttataatactctagatgtacaactatacacactgtgaatgtccatcaataaggatattagacaataaacaatgttataaccaagcaatggaataaatgtcacctgagtcgtaaagaatgaggcaggtttagctgtgttgcaatgggaagtttctgtactactttgtcacatgagaatttatgctggtacagatagcactattctatgtttgtaaaattttcataaatgatacatatttattgaatgccttctgtgggcctcgctgtccttggtacttgagaaaagcactgagtgaagtagatattatccctgtctttgtcgagtttgtagtctaatgggagtatgaggaaaagcacaaagactgagaagtaaacagaactgctgacacagcaaagatttttaaaagggcaagggactctggtggagacgacagtggtgggaggacagccttagatgaatgtttagggacaatctctccaaagagatgacacttatgaccttaaggatggatggaaattacctacgggcagacagaggagcagaatgtttcaaacagagagccagaagtttggaaataacctgtggtatgtttgaaaaactcaaagaaagtgggccagaaaatggaatgaaggagcacgtggtacagagaggatggagatttaggcaggggcagaccatgttagacgttggagatcctgcatcagagtttgggcttgactccaagagctgtcagaagctactggagggtggtaaggagtgggaagatgggatctgttgagtaaagaatgtattgtgagggtcaagagcccaaccagagacaaggccagggctgttgcagtcagaaggtggagaggcagtagcttcctgtcctggggtcgtgagaggtgagatggtgaaaggaaggcagattcagaacgcatcctaccctcctgaggaggtcggggagaaaatcagttcccctatcacaccccttgcacagatgaacctcatatctcaaaagcaaaatagttatttttaaacaccagtactttttctttttctttttctttttttttttttttttttttagttgatataatccaactctgtggaaattgtgggaaacgccatctctggggataatgtacacatcatagataaggagactataaagatggaaaatatcgataccttacacaacttctttgcagaattggaagaaaagggtttttgtttgaaatgcaacgtgcactgctgtgtttgttaccctttggctccaaacaatgtccctccaaccaacagcaaatgctgaatatgttagaaagagggggagggaaggaagagtgactcttataatctcatgattgttctgcacgcctgtgggcagaagaagtatggctggaattagggggtaagagagaaaggggtgtgaagcaaaagtatgactttgagagttcacattcagcaagtggcaactgtgacaactgttttgcccctaggacatagttgacggcaaggaaaaagaaggacaagaacttggaactgcggattgctctgtccctggggacccagaaggactggagactgcaaaggacgattcccaggcagcagctatagcagagaataataattccatcatgagtttctttaaaactctggtaagcagttttctcctcttttcccctccactctattgctcaaaagttttgttaattctaagaataatgcacatttgaatgttattgtactaaatgaattatcatggtgctgttggagcatgggagagaacagggacaagatatgcttcataagaaagttgtgttatatcagacttttagcaagagagcccctgaagctcggaaccatggtataagcagtggatgcccaaatcatgtaacatgggctgtgttgtaatggaattctattgcaattgaatgtcttatgttcattgatcataaaaataattgaaaaatatctccctgtgttgtggacatctcaaagcagttttgccactcaagtggcaaataaaatactgtagaaatcattcaaaaaaaaaaaaacctgaatgaatgaatgcatagtgaagcagactgtcccaaatgtgtttgggctattttcaaatatcaagactaacctcaaaagaaaaaacaataaatgtcaacagaatgtgccacaaacaccagagggttgcacatgtgtttggagtaatggtaaaatttattggaagtctgtggtcttccaggagacaattttgaatgtggtcaaactcttggtaaatgtataagatcagatgtatctcattataagatattaattttgttaacttttgtattacccggcggtcctgagatttctattgaactaaaaatacttctcattttattcttgacctgtatggtgaactggaccaccctaaagagttatttatctatgaaataaaaatcactctaaagagcaatgatttctaatatttggctttctcaaacttttaaggtttcacctaacaaagctgaaacaaaaaaggacccagaagacacggtaggtagttggaagtgtgtatgtatatatttgggtttgcgcatagaattggatttggatttgtgtctgcctgcttgttttttgaatacatatatgtgtgtgtgtgtgtgtgtgtgtgtgtgtatcatatctatatataattagcaatttaatagtgctgttaggttgtcattaaaatattttatttacattaacagtagttaaattaaaattttactggaaagcttgaaagacgtgccaactctggctaaataatatcacaataccaatttcttatatagcataagaacagaatactaataattatatcatcatcttagtctttttagttgtgcgtagagggacccagggaatatagtaaaaaacagtccatgtaaagtagaagaaagcttttcagtaggacgtggactctaaaaaaataaagtagaagaaagctgctatatttttgttttctaaaaaatatgttatttttcaatgtaatttgaaaactaaataaatctttactgcaaaggcagtggtttggtgaaatagaatagtttccctggggcacctgccaaacggatggccatgcagaggcgttaggacacgctagagagcctaggttcttcactgtcatccaagaattcagcccactctcctcaaaataaacttggtttgaaataccatcttcctagagatgttctccctttacactggacaaggctcgttacctctagtggaatacacggtttaagtttcacgggaaccatgaaggaagtttaacttggtgacagataagtgtcttgggtccttcttctgatatcggaaagtgctttgaaaaacagtgggatcagatacatggcttggtttgccccctacatctgctacccacatgtgaaggagctggctgtgaaaagaggatcctagattttgtctcaaaagacctgcatttcagctccagttctgctacttgatagtggtacaatcttaatctgtctgaacccaagtcttcatgtctataaaattgggacaaaaaaattctttgtcctggaccccaaggttgaatgaaggtgtggcattgttttgcaaactgtagagctctgattaaatgtagcgatccctatttcaatgatcacagccaagattggttgaatgacatgactacatttgtattgtatttcttggtttcctcgagaattttcttcttccattggaaaaaaatatgtatctgaagcatctacatgcattttcctataaagttattcatttgctccgaggtcatagggtcaagttcaatgaatggttggggcaaaacgtatttcttttggttctatgtcttgcgttgtttgaagccacatagcgtaaaaggctctaaacagtggagtatgggaatgtgtgtgtggcttcccaagtgacctgatgcactcattctctttagctggtcatggaccaagactcctccctgacccagaatgtggtcaaaactgaacgtacccagctgataaaatctcaccgtcctgcccaggaagctgtggggtcacattagtggagctgggtctcaaaagcgggttttgtgaatgtaggttgtccatgacacccacaaacagatgtgttttctacaaacctggttctcataccttgcaattttgatatcttttctactgaagttcttggattcatgcttttgaagtctgtattgttttcagcccactaccttccctacacgaaagtccctgacatttgtaacttgagccaacaatcttgagtggttgtagccaggctatttcggtttcgatctccctctactttgcctcagtggattggttcacactacacattttctctgcctggcgggggtctacccatctagaagtgaattgaaatttttgcaggtgatattgcttccataaagtttctaatagtgaatcaaaggagatcgatttgagactaaaagacattcagcagcagtctttgctttgactccaggatgaaaaagaaatattttgtctgcaggtattttttactttaccatgtagcaatagcatttagatatctacaactatcaagtagagactgcattatcttctcctgttatttgtcttcagcaaatggagatacagagttttgttttgttctgtcttgctttgaggtgtgttcatctgggtcatttaaataggtcactgttgaaaatcactgtatatctaaaattgtgaatatggaagtttaaaaaagataaacatttacagggtgttttgtggttagaagaggggatggtgtaccaacagttaattgtcacagcgtattaatgcactttaaaacaacagaaaacaaaaagaattttgttcaaaaacaaagttctgaggttgtgactgctgttgccccaaaggcatcgaaagcagaaagtgtctgtgatggacaagctggtcagaagacatccgagatccaggctagaggcaccaagaaaaagcacctggatagccccaggctaggactcgcctttagaaaattctttaggcataaggtctgtatcttattaaagtaggaggaaaaacaagaactctggtcttcacaagacatgtgccatcctgagcccacccagctcctctccagtaaaaacagagccttgggtggtggggatcattaaaagagaattaaagatgatatgaattaaacttcagtgatttttaagtccccatagtcataaacatttcaaacaggtgtcttcctagtgcggaccagggttctggaactattcttctaacccagtatttcccaaatgtcaataacttgtgtaccaccttcaccatttttgttagatgtactattatttgatatttttacattgaaattgacctattttctatttaaattgtatctttaaaagaaactttatatcatatatagaaaatcagaataatttttcctaagaggaaggtaagcattaatttggctaattaaaaagacattacattctagctacctcatttgtattaagctctgaatctgatgctctttctagctttattaaaaggtgattaattggccaatggtagaaaaatgttaaagatgtaccatcaccagactgagactttctccagaatgttagtagaaggattaaatgagagttggaaaaggagaagtggtttcactatttgaatactatgtaatatcatatttctgcacaatctataatcttctctgatccaccaatggtatgcttcctacattttgggaaatactcttctaacctcaagtaataatgttatctttctgtggtctgtttcatctatttccaatattaactaagcttacactgaacccaaataaaagtccaggcggaaaaaagcaatgaatgaaggcagagcatgtttcagctccatgtccttgggaagttaggacaacactgaagtcagtttgggaaatattatgcttccaatgtctaagaagacgccagtgtttgtctgaaaccatcagtttaaaggatccctgaattgggttagcatgcttgaaaatttgtttaaaatatcagccattttccaccaagtcaaaagcctgtattaaaaaaacttccctacctggatgtcacagtcccgggattgtatatgcaaataagcactccatagaaagttctcacagctgaatctgtatttgcgtaagcagactatgttatgaagccacctttcaatttccatacaggataattttgttctgtgaagagaaaagaatggggaatgataaatattgcaacgggggagggaagattaaaatgtgctccaacatcacataacttagtaactgctgggaaataacttagtaactgctggtgaaacgcgtcatagatctcataggaaagaatctagtttaactcccacttggagcttttgtaagtaaggggccttgaaagtttaagaagtgtatgatgtttccccagatctgcctttcattatgacattcacttcatgcactacaaaattttacgtctgcagtatctcttgccaccaataaagggaccacccaagttcaatgttatcattcctagggcttcccaaaaactgttggcctcccatcttgtcactgaggtagatggggaaaagacaggattctggaagagtgggaagaggccgcgggaacagccttctggaattctgtaacacagacacaaggacttcagggttttgccttgagtggcattcagtgtatttttttatgtaagtgtaaatcaaagtaagggacacctcccaaatgttctgaattcttatttacgcagcagtttgttagagctcattggcttttacctctgcacctgagatagttcatttctttttctcttttgattatttctgttgtctctaaagataggaaagtagggcctttaaataaccagccagattctctcagtgacattatcatgattttaggaggtgtgatactctccatttccccatgggtttgtcacctggaaaagaaaacgagaaattcaagcaaattgaaggataaaactattttgctattaaaaaaaaagttaccaattctggttaattctggggctttatttctctacatctctatgatccttcttataaaaagaattttctcagttcaaaaagtagggaagtctgaaatcagtaagtgaaatacatttagtgtcagcttttgctgaattggaaccatttttctcggcctaatggcatgtgatgtctcagaatcaaactttttcatgtggccaccactgtttggtgacaactttagacacaaaacagagcattcctttagaatgcctttgccatgccccaaaatgctcccctctctcctcaggtttccccagtgcccaccctttctgtaaggcagctgaagtattagcaagcagcatgcatgatttataagctctaccattcattcattgtttttggttcttggtgtagtgtttacatcttactaacatctcctctctcccacacccaatgtgaaaacaagacgaaaatttattaagaaggtaaggtcatttgacatacaatctccaaattgaatccactagaatttcatgggcagggccaccaggtaaaatatacaggactcagttaaattcaaatttttgataaacaagaaataactttttaatttaaatataagtatgtcccatgcaatatttgggacatgcttatgctagaaaattattctttgctgatcttaaattaatatttaatggaatatctcatattcttattctcatgtgctaaatctggcaaccctattcatgagattgcctctgaaaacacaattaaaatttttgtagtctcctctgtaacgcaaacaaagaatatccagttggttgatgctggcagaactccatctgggggacttctttgggaaggcaggagagtggtgggcaggaatgaaaagactaatggtgttctgactggtattctacaacccagtgagcaggggtgggtggctggaaatatggcatgacaggatcttgtgtgggtgtctgtctctggtccctgtcatagactgtaattattaattgaatgactgattgtctattttgtgccagaagctaggcctgatgggaattggggacgtaatcatgaccaagactttcttggtcttaggatatgatgatgaccaagactctagcaaaagagatacatattcaacaaacaactacacaaataaattagaattatatagttactataactgtagtagggtcatgcccttgtaatgtttttgaagggtttctggatatcctcccaatgcaaagagaaaaaaaaattggtcacttccctatgaaactgatcagtatagatgtgtttcccaatctttatctcagtatcagccctcaccatgatacttttttagactattttttgccctaatcacccttccctccacgaaattttaatgtaacaaatattctttatacctgttaatgcactgtaattctttaggggagacacagaccatgttaatatctaatttggcataacccttctcccaagaacaaatgcaatattattttttgttgtatattgcccttgttgagaacggtggtatagatttccctcactgatgggtggaatagcccagggagcaggaaaccttgattcattggaaacagtgtagtatggagtcactattaatgcttgggtttggggatcagactccctggattcagctgtcagctctgccccctcattagtgtaactgtgggcaagttacttagccaccaagcaactaaatttccctgtctgtgaaattggcataaaaattagtgtcttcctgtaagttgtagcatttgatagtaccattgggaaattacagctaacagtaatttattggatatttcaaaacagctagaagagaaaaattgtaagcttccaacacaaagaaaggataagagtttgaggtgatggaaattccagttaccctggtttaatcattgcactttgtatacaggcatcaaaatatcacatggaccccccgaaaatatgtaaaactatgattcatcaattttaaaatacaaaaaataatcgttcgtcataggacttttgtcaggacattcaggtgcttaaaacagtgtctgtcactgttaccttttattcttgtcatcaaataaaagtttaaagttggaaattatgtcttcaagatgcaacagtggtccagggagactaagcagagagagaaagggtggtggctgagcggtgaaaacggccaagtatgtaatgcattaggtaaactggagctgtcccaggtaaattctggcactccaggacctggggaccttgttttttgtaacctctatgtgactctgagtaagtgggctaaatgcacatcaaagggaacccttgagccagaaaaataacacagcatttagaaaaggtacaaagccaagccacagaagttacaccaaaatagcgtggggccatggagccgcccttctaatgacttcggcagattgatgattggcttaaagcaaccagagccctttcttagagatggggatgaggtcagccccaacccctggattcttggtctaaaatggaccactgggcaaatggagattctcccaggaaagcagaaggagaggttgttgttgaagtagccacgcttggccactctttgctccgatacttgccgaaggaccttagggcagttgttccctgtgcgtggaaaactctcttcttcccttctctggttaattttcagtcacccttcagatcaaagcacaaccatccttttctcagtgaagtcttccctgattttcatgagtggatcaaactccttgatttagctttttatgggattgagaggaatagcctcaaatcgcctccccactcagtagcacttattacagttgaaattttacatttatttgtggaattatttactgtcatcctctccttgaggacatgtaaccccagcacttagtacatatcatggctcatagaggacactcaaagtggattttaaatgaattattgaataatactttctcttattttctgaaaaagaaaacaagctacttagcatgtgtgtgttaggaggaggggtacttaccctttaaccagtcccctttaatttaattaccgtttagagctaaaatagcaccaggtactcaagagcgtttgggacgtttgtaatgcagaatcttatgagctcagccattttgacttcactgtctataaaatgcaaaggttattgtaaattccaacattttgccattttgtatacttttaaatggaactggagctattccagtatcaactatcacaaaattcatttccagacgtcagttctttatcttaacttgaacttagaatctgctcaatggatgactccttcttagtattaaaaatttcagcaaagaagatgttgtgtcttgcatcaaatagtaaaattcatgttatttgcaaacatcctttggagaagcaatatgctgcctgggaagagctctagaaaggagccagaagttcagacttgaggccaggttgtgcccttgttcagcgttgggcagatcattggcctcagtttccccatccatgaaaattcatgcattggatcagatgggctttaagactctttccaggatcaaaaaatactgtcaaactttctgaatttgtccatattctatattttttttgagatggtgtcttgttctgttgcctaggctggagtacagtggcacgatcatggctcactgcagcctcctggactcaagcaatcctcctgcctcagcctccaagtagctgggaccacaggtgcaagccaccatgcccagctaattttttattatttgtagagatagggtttcaccatgttgcccaggctggtcttgaactcccgacctcaagaaatcttcccacgtcggcctcccaaaatgctgggattacaagtgttgggccaccacacccggcccataccccatttttattgcaatatattttttcttttagtcagaaaatttattcaaggatattacatccctgggaatttaaagggattgagtcataagtatccagagcaaaaaaaatcataaaatgaagatgtttaggattaagaggttaggtcagatgaacctgatgttaaaattatgagtaccaatattcactcatgtcaagataaattctgactataattctcccaactcttcctttatctcatgactcagtgggtggcagagcatagaaattaacacccccttgctgaagaaatcagatgtcctggaattggacttcagtgcagctgctcagagagagagacagaaagagagaaaggagatacggacagagggagagagaaaaagacagagggaaggaggcggaggaagggaagaagggaaggaagagagaggaagagaggaaataaagaccgaatggataacatttcaagaagttttaattgtggagtgtagggctgcacctaaaagtgaagaaatagggtttgtggacactcttccaattcaaaatcccttcaccaagttccagcctagttgccttttactaactttatagtctaactcagtcatccccaaagtggagtatggagaaaaatttcagaagttctatatttaatttaactctcctttaatttctaattttgatcagtaagatgatgcatgtttataatatatacataaataagtatgcatgtattgaaggtggaaattcaaaatgtttttactgatgggaacttgattgaaaccatttggagaccagtggcctaaataagaactccatattctaacagcaaagggtctcttaccaccaccttgattcctaatgagttacttacataaacataattaataatgcttctatgtttattttttgaaagaaaaatatcttaactttttctgagattttaacacaagtccacattcacagtaaaaatttttaaaatacagaaaaatataaagaagaaaattaacattatgtataacctcagcccatgtttattaaaaagagatcttccatttttaaaattttgagaccattttgaatgttttccctccattttttttaactctttagggtgctgaaaagtcacccaccacttcagctgaccttaagtcagacaaagccaactttacatcccaggagacccaaggggctggcaagaattccaaaggatgcaacccatcggggcacacacagtccgtgacaacccctgaacctgcgaaggaaggcaccaaggagaaatcaggacccacctctctgcctctgggcaaactgttttggaaaaaggtaagtctgattttcaagcgttagagagtcgtccgggcggggatgactccagaacttatttctattgggctaactgttgtactcaacaatgtatggaaggtgtttcttcttcttcaaaatgactcggcttcccattgagtagaagccttctaatgtgttcctaggaaaaatgaaacgcctgtcatgttataaacatgtgtttcgtggggaagaaaaggaaatgaacaagtagaatttttcattctttgagtgacttcatttcatgacagagggttgtggtatttcatgatttcattttccttctgaaatggtttaaaaccctgacttcttcctggtctctttgagcactcttactctggcaagatgaactacctaggggctgtctgtcttcactcctccccagccagacagaatcattcattatcagccactaggtctccactatccttttagaaacctagggtgtccatcagttcaccaccagggtaggcaaacactgtgctctatgacaggaaaagtcaaaccactgtctgattttgttcccatctgaggtctgagtggtgcaaggacagggagagtggggctgagttattctagatctattccttaattatcattgctgagcaagccccagctgctacacatgtgcagagcttttgtctgttttaaatttggccaaaagatgagcaagaagttggagatgagggtgtgggtggaattcatagagctggaaaaatctaacttcagaatttcatcaaaacatctatcgcacttggcacaccatgcaaagcagatgatgaatgcagatgccactgtggtgtcagctttactccgtcgtccagaatccagctggatgcggggccccttgcctgtttgcttcctgtcatacagaaaccttccttccaggttcttcccagaacacagtcttcactatttcataaaaactttggatgatgtcagctgacacattctgttgtaatcctttttcttcatcacccaccattacttatcttaaaatatcttttaccagcaatataatagaagaaacaatttccaagtgaggtatatgtgtatattggagacaagagagaagacttaagtggcccatatctgaataattttagttaaataattaccatgtattcatatgcatattcaaggtgtcttaggaaaaatagagttagcacattaaatttgagattaacgtatgttttgctcaaggttaaataagcatattttgtttaaaaaggaatctaataaaaagacagtattacataaataatggttctgatagtagataaataatggtaaatttgggtcctccaagaagcagacaccaagacagaattgacgtgcaagagatttattggaggaagacatctgtgaaggagaagtaggagtggcagagctaggtacagagagccttcagactacagagagttctgaccatctagcaagaaagagagagaaggaaggagaagtgggtggagaaagcctcaaactgaaggtggtgctaagaaagtcctgaccaagccaatggagaatcatagagtacagattgcctgttccagaggcccacactggaccggaatgaatggcccagtactcctgtcgtgcccagtcattggtaggagcccccagggagaggagcagaagctgaaggcatgacaggtggggctgtctttcttgcaggaatctgagcagcacacttccatggctgctacagatgatacaatatggtaaaaaccacataggtggtgtgccagtggctaaagtttgagaaacactgatgtaaaagctaaaagtttgaaatcagacagctctgactttgagtctcagtttgtctctatgagctttcgtttcctcacttgtaagatgcaaatgataatagtacctatgtcatacaaatgaatacaaatgaagtaaggattaagtgaaataatgatggtaaaacctccaacactggacctagtacaaaagtgcccactgaacagtgttacctctcatctatttcctccgtgctcaggagggctgaagaactaaccaggccgacgtctttatctttctatactgtccagtttgagaaagctgctaaactattgcctcaagtgcttatttaatgtttggaatctacaagagatacagtggttcttctttgaagttcaagctattcctttgaaaaacaatgtcaggacaacttgacattcatctccctaatgatagaatttcatttatttcagtctcactgtcttttgagccactatttagctttatttagtatatcattaaaaatatgaagttaaaagaaatcaaaaaccaaatcccctgtgtctctccttcttgcacccaatcagaagaaaaggctcttcgtcaaagttttacttattcaacaatattgtaattactttatttgtgctaagtactttatttgtgctaagttgttttgtgctatatagtttgtgctaaatactaggcattgaaaaagtagcagtaaacaaatgtctgccctttcctagcttatattcttgtaagaaagcttatattctagcagaaagcaaaatgaggacctttgttttcttttcgttaaattacaaagactatgattataaaatcacccttgtaaatttttgaagagttttgaaaaatgcaaagggaaattctaggaaattcttacattttcttatattttcactgataactaacctaacctctctttcttctctcatttttagttgaaaagctttcaaacatattgattttaaagtttataagcctgtagttacagacagcagaaatgaatttttcccagaacaggctatggatatgaaagtataagttgttttgatttatagtctttattgctagagtagttattattataaaataaaaaaatacctttaaggaaaccaatttcaaattatgttgtactttccaaaaacgtgtttaaaatgcagttaactggagtaaatatgccatttattgttctgagtaaattggattctcacttgctctgtgaccttacataagttatttacactatttgagtttcttttcctcatttgttgaataagaggattgggatacacagtcttgataattcttgtgtatggcaaggcttacacaacagaatcagaaaggttgagctgtgtatccctggacaaattggttgaccactcaaagaccctcctttctaatctgtaaaataaggactgtgtttttctcacagtgttgttataagaaaccaataattgtacatataaagcacctaatatatagtatgtgctcagtgaatgatgtcatcatttcttcaagtatgaacaatcagtggtcatgactaaacacccacgtgtggcttctggtgttaacaccacctaagtacaaaacaagtataaaattcatttgctagcatcaaaagatttgaaatccatttggaggaacatgatacacacacacacacacacacacgcacgcacatgtatttgtaattaataattgatatatttggaatatcttcaaaatatcccttttctgctttcctttgggggagacaaagagtggagtgggaaaataatgtgcactctgaagccacagagacattatcaaatctcagttctgacagttactgactgtttaaattttagtggagcacttaaactcttgagcctcagtttcttcagttataaaattggccaatgacatctatctttcgtgtttattgggaggatcgagtaaaaaaaaaaaaaaaaagaacgccaaatgactgatattcagtgaattataacccgattctgaaacaacgaaatttgcaatttagtattactctgtggagtacaggtaacaaatgctacggttgtttagaaaagggagcaatcagtgtacgtcaaaatagacttaagaacttaaaaaacgtatctgaatcatttgggtgatttgtttcaaatacagattttaacaccttcccatggggattctggttaagaaagtctgggcatatgtctgggcaattatggaagcacttgaaagatgggctgaccaatctgggcttaatagaaaatgtcttagggctactgtgaagttaatggactcagaagagctgtcacatgatcaaaatgatgcttttagaagactcactaggaacagggcaaatgctggcttaagtgttaccatatgaaagtcttttaaagaaaccttaagaattgaatttgctctttaaaggagaggaaactctgttattctagtttctatggataggttatctgctgtttagctccccattcttagcaatataaatgtccaaacaggatcccgtagattttaaactagattttttattgtcactgttaatgaggctggacctcaactgtggatcatccaccacaacatactcattggcagtagaaaataatgaattgaaaaatgatattcctggctccctagctccaggcttcctgttatatagagaacatacagaaagaagggagaagttgccttcatttgtctttatgtatgagcatggaaaccatgcctaatacaaatacaagttaaatgtgagatccaggcttggctcaaagatgctcaaagaggacgctataatacatcagtcagctttcaaggagagtagagacacacctcaagccccaaaggcagatgtgatgtttgagtaaaagcaacagtttattagatgttccaatagagacctagaaattaaagaagattggtttccatttgaatactagcttggaatacaacataaagcacttaacccactgcctgacaataatagcctaagagtggccctataatgtgggttgtcatcactattatctctattagcattactatttttttcagctctgtgcaattgcatctaatgcatgctaagaagctggaggaatgcaagccgacaaagaatatttattaaggaacaaaacatattgcaaggagctgtcttcgggaagccctctggaatctggcctcagccctgtttattcaaaatttttatcagttaacttggacaacgaccaagttaaaagaacatttatcaagtttacaagctgggtgggttcactagtgcagtccaaaatataaacaatatgaatctcaaaataacggcacaatgggctgaagttagtatgacctagaatttttggttttcaaaggtcaacataacactatgttatggtacttgggtcatcaagattttaactgagacccacattgtcccctacaccattccaactttggaacctaatataacctattagttagcagtgttaaaaatgtctgtttataaggggttccgtagcaaacatacatctggcccaagcagacttaagaacatttcaaaagcaacatagaattactcaagaaaaattctaaataggtctagtagatctagccagtgtcatttcttcccaacatttataaaaattgctgttgctaattgaaaatataccatgtgcaggtactgtgctaagtgctttacataaacaaaataaatatcagcaattttcatagaatgctgaacatacatgaatccatgcccacacaaatcccatccagatagttctaggaatccaagataggtgatcatgaatcagcctgggctgccatatgtccctactgggtggtcacccccaagccacaccactgccaccaccacagccaccaaggagatgatccgtgccaatttatcccactcatcactgctgttgggactcccaagcccacgagagttcacctgtctcttgcaaggcagcaggcagaaaaccttttccttccatgttgtgcttagctctggaaggagaatcccgctgcagctgcttggaccccagagtggccccatttggcaagacccactgtaggcatccatacagccctttttctccccagtagacagccagttcgagagtagctgagctggaatgagttgttctaccagccaccagcaccctacccagaaccactatttcccacaagccctggaggttgctgattctggagttcttattgctcctggtaaattctcttgctagggtccatttcttgaaacctttatttttgctctacttcaatacattctggcttgtagaaaagcctatagaccactgtaccctaattccagacatggtttgagttgttcctacccctcccccataaacataccttccaggatctccaactcccatgtaaatgagggtcttcatgtaagtaccaagaggaaccatgtgggtttgactccagccaccaggcttcagtgagtcacagctgtgcttcagccatgattttccctacacaggccttattttattttttccttaaaacaacgctatgagcagtagatagtctaacagtcagcctttgggtaagtgaactgaggtgcagagaagtgtgattaatttgctcaagattgcatagctgaaacactgaatttgtacctgattccacagtgtatggtactctagacttgggttctgagcagattttcttttacatgtgtcaaacactaaagggggatcagaacctgccctcttattatccatttttgaattcttattttaactggatatttcaacaaccactaacagaaggctacacttgcaggccagtgtgcaaatgtacaagaatagttcaaaattatttagagtgactcttggacacaatctgagaagcatttaatcctttacatagtgcatttatctcctgttttcattctataagaagtctcttcttgatattcacaggcatttattactgtacaaacacctgctgatctcttttttaaagaaagacttaaaaacaattagaacttactgcatgttttttatctattgtactttttaatacgtactactatttacagcaaagatgttgatatgacatttgctgtaatgataaggcatttcttttaaaatatatttaagaaaaaaatattaagtaaaaatatatttaagtaaaaagagagtcagtttaaagaaaaacatcaactgaatagaggtggtacatggacaggtcaagaattagaacatggttttttgttcttgcgatagttgactgagaatgatgatttccaatttcatccatgtccctataaaggatgtgaactcatcattttttatggctgcatagtattccacaaaaaaccaaacactgcatattctcactcataggtgggaattgaacaatgagaacacatggacacaggaaggggaacatcacactctggggactgttgtggggtggggggaggggggagggatatcattgggagatatacctaatgctagatgacgagttagtgggtgcagcgcaccagcatggcacatgtatacatatgtaactaacctgcacattgtgcacatgtaccctaaaacttaaagtataataataataaataaataaattaaaaaaagaattagaacatggtatgaaaatcattgaagtttgagagatgctcaactggattatttcccaaaatgagtgctttgctaagtagtctgactttaaaaatataaaatagcaattccttttgaaaaagacaatatttataatgccagacttaaaacatcagaaagatgtggaggtctgaaaccataatgaagatttaaaaaatctgttcagaagcagccccttctattcctcaccatcatctacattggtgatggaatctactccaagttcccagttgcttctgaaatatagtgagcaatgaacaaccagaaactttctagacacaggcaatcaaagataaaaactagtcttgttgcaataaactgggacaggaaaaagggtatgtaaacctagaagtgctgttcttaaataatggaagggttttctcagtctaatataaacagtataatgattcctgaaacttttgtgggccggccttgaggaggtctggctttaaagataccatttggttcattacgtgttcatggtattaaccagtgtctgactaatctcagagaaaaaggggtgcagtttcaagaaagtatctgatatggtttggctgtgtccccacccaaatctcatctcaaattgtaatccccataatccccaggtgtcaaaggagggacctgataggaggtgattggatcatgggggaagtttcccccatgctgtcctcttgatagcaagtgagttttcacaagatctgatggctttataaggggctcttctcccttcgctctctcttgcctgccaccatgtaagatgtgcctgtttccccttccaccatgattgtaagtttcctgagtcctccccagccatgtggaactgtgagtccattatgcctctttcctttataaattacccagtctcaggtatatctttatagcagtgtaaaacggattaatacagtaacactactgctaatttcttctgaacacattacaatttcctgataatcagaagctttcagaaattcagcaatctcttttaggaacatttttgtgcccagagaaacttcactgtgggaagaagataactagaaataaattatgcaatctgaagatctcatctagagagaataattctgtatgtgaagaaaggaattcacacgattgccgaaaaaatgtgtttctgacccttgaagtcatcatagcaggggaaaatttggcttttagatgtaaaataaatgtattaaaaccatttccaccactttctagctgtttaactggaacaagtggcttcacctctctgaacttctatttcttactctgtaagttaggatcacaatacttaccattttggggtgctttaagtgagatgatatataacgcaagatgcctagtgcagaagatacatttgtaaatatcacttcctgtcttcccctcccctggatgccttaaaggaaaaaaaaaaataggacttagtaacaaaatggatatagacagagttcttaacttgtaatccaagaggagagacatagaaggtctatgaatcctgaaattatttgcaaagtatattgtttatgtgcatttctctgggaggagagtccagatctatcaaatgagtctcaaagtggtctgtaacatccaccaccatccatccagaagtttaagaaccaccaaaagaaagatgcaaaaatgaactccaaagttggctaactgatagaatgattgtggctttgacctttgacagaatcgggataactcctatcccacttggggcaggactgtatatgccagaattactcctgggagtaaaacggtgtttgaatgtggatatgtaggactgcagctctctagccttccacagacatgttttagtcaaattgaactttgacctaatgaacttggcctagactgagggctgacgaaagcagcggcccctgctgctggcccctgtgctatggtcagggtagggcttggaccctgcctattgtattataaagcctgcttgctcaaaaggacaattgaacgagtttctctgcacttattaccagaattttcctgagtagcttctttgttttacctaacagtgactctgtattgaatgattaattgcatttctctcttttcatcaactactaaaaaatataaaggcaagtacattgcttacctacagcagttagcattttctgtgacaacgcttctgcttgctccatttgtatcctggctgcatctgtgttttaattttctctttgttgcattttaaaatacataactatatatatatatatataccgttttcatttttgtaagtctcctttctttttagaaggaggtgtacctaggcaattcagtgtccccgaacgcaccccaagactgtgagcccaactaaccctttgcttttatgtaacaattttgttttctgtaaccttttaactctcacttttgtttttatcttcctttagtcagttaaagaggactcagtccccacaggtgcggaggagaatgtaagttacacacaccacggcagaatcattccattctcatcttccgccatgttgtacaattgggcattttcagctctggggtcctgtgttcttgcatgctgccagtgtgattcgtttgttgtagactctcttatcccgtatgtgattagggacgcatggaggataacattggatgaatttttgtaactctcattgaatcagtgcaaaataaatgcaaaatcagggcacaaatttttataattgttatcagtaggggctgaaagagtctactacacgtaagaacagctttgcgcttccttgagggataatgatgctccgccttctgcttcattccaccttgactgctcgttcactcttatttccatggtgatccagcttcttactaactttgggcggtacccagggcagggagttgcatcaggcatgagaacatcttgcagcaacagacgctgagaatgtcggtctcaggttagagcgctgacttgacgggtctacctctgagatagagacgttgagcctcacagttttcctggcttttaatcttctagaggaattgtcaaaattttcaagacagttcattcatccccgaaagggatggtgctatataaaacatcacaaaaacgtagcttccagggagattaataaattgacctcgtgagtttcagacccaaaacaacagctctctgccttgaaagaagtgcgcagtctttgggaaatttttataagtagggataagtgaattcacagctccttgagatagaaaccgaacattatcatgttgccaaagcaaaacttgttctgggtgtcccttatttacttgccataaatagggcgtgtgtttttatttttatttagttatgggaactgaacagatgttaaacatccaaacacgtttctgaaatgttgtctgtgatgtggaataaaaattagaatggctgtgttatgattcttattggaagaaaaatcttgaaattgtgtccggagttggttccttccggtgggttcttggtctcgctgacttcaagaaagaagccacagaccttcgcagtgagtgttacagctcttaaaggtggcacagacccaaagagtgagcagcagcaagatttattgtgaagagggaaagaacaaagcttccacagcgtggaaggggacccaagcgggttgtggctgctggctggggtggccagcttttactccgttatttgaccccgcccacatcctgctaattggtccattttacagagtgctgattggtccattttacagagtgctgattggtgcatttacaatccttttgctagacacagagcactgattggtgtgtttttacagagtgctgattggtgcatttacatccttaagctagacacaaagtgctgactggtgcatttacaatcctttagctagacacagagcactgattggtgcatttttacagagtgctgattggtacatttacaattctctagctagacagaaaagttctccaagtctccactcgacccaggacatccagctggcttcacctctcaaaatctgtttgttggttttactgcccttccttccttcctccttccttccttccttcttttctttcttgagccaatcttagcccagcaaagctcaggtctctcatcattccagaaagttctcatgaattactattttatagaaagtcaaagtttctattcccgcaacctacaaggaggactccacaagacttctttctacgaactttaagtttaaaagctgcccgtaaaatctgtagcatctgttagctttgaggttctgagttttctaaagaaaaactttttggatgtttgtgtgtagttgcttgtttaaggaaccctgtgtttcccgcagctcagatgctaaaatgcagagttgatctctaacaggcaaacaggagatattctattttctactgtgaaattttaaatagaaatataaacaggaattaaaagttaaattatcgacaccaaacgataacacaaaaactgatgatagggacataaaataaggtaaaatatttgttaaataaaataaagaagcattataaaaattgccttaaatgacttaacactgcaagcaacattttgatttttaaggctcaatatttcatcttctttttttctgtttgtgtgtttgtttgttttcttgagacagagttttgctcttttcacccaggctggagtgcagtggcgcaatctcggctcactgcaacctccacccacccaggttcaagtgattctcctgcctcagcctcccaagtagctgggattacaggcatgcgccaccatgcctggctaatttttgtatttttagtagacacagggtttcaccatcttggccaggctggtctcaaactcctgacctcaagtgatccgcccaccttggcctctcaaagtgctgggattacaggcgtgagccaccactcccagcatcagtatttcatcttctgacagcctatcacttggagggaatgagactgatggttgtgacgttgatcccatcatcttcaggccacacctcttgagcctcagtttactcatctgttaaatggcgataataatatcacctacactttcgggttcttgtgaaaattggagatcatgtctataacgtgcttacttcagtgcctgaaatgtaggaggaactcaataattttagggatcagcaaactgtagctcatgggccaaatacagcccacaagctaaaaatgatttttacattcttgaatggttgaaaaaaaatttaaaaagaatattttatgatgtgaattcaaaattcaaattcagtgtccagaaataaagttttattagaacacagccatgctaattcctttacatatcatctatggctgctttgttgctaggcaacagagttgagtagtttcaacagaaacactgattggcagggactttgcaggaaaagtttgccaccttctgcagtaattgttagcaaattagcaaataagagacaacatagtgagtgagcatgtcccagtaatcggtgattttctttcctagtgaaatgatacagctcacagctgactcagtgtccatgtggattgaaggaatgtgtaaaacagagttagctttaatttcctcctctcttaaataagagagaaggcattagtcaaaacaatgtatagtgctctacaccttcacaacaggacaattagatatgattaaccatattacaagagtgctttaaataacgacttctggctaaaatgtggttgagtttattctttaaaatttctctacctacaactttccagaactaatctatcaacggatgcaaggcccacttgtatttaaaaaaaactaaaaaacagagtgatgtcaacatttctcaaagtttctcacagaaagaaaaataaggattttgaagcctgtggaagtttagtgcttttcctagaatgtgcttctggtcctatcagaaataaatctttttttaactcttgaaatgatagaatctttcagttgtaataaaaaaaatattttgcccattggttaattgagttaatgttctaatgaaaaaaatttctttccttccaataacctgtaagaccatggaaacaggtacttctgttgtttatctctcttaataagtaatctctcagttgcaagtgaaagaaaacccaattcaacctggattagaaagaaagtggcctttactggctctcattactagaaagttaaattgctttcaaataaaatttaattcagggctctccttgggttcagccttcttggcctggctacatgctcagctttccaacatcacatcactcagtccaaagtaaatgagctatttgtcaagtagcaaccctgcatgtcctggagtttgttctgtttcactgactgaaatgcattcacatgctgtattcgtcagcttttgccaggttgtgttgcagtgacaaccaggtcccaaattacagtgcttctcaatagcaaagaagtttgttttattttttcttttctcactcatgctacaagccagctatcagttggctttggctaacccatgtggcctcttcctgctgaggtcagtagagaagcagcagtcccttcaataaggacatgcagttcttgttgcagagagaaaatagtggcatgggtgaatcatgcaacggatcctaaagcttctgctcaggcatggtatatgtcatttctacccatgttccattactaaagcaagtcacacatcaatgggcacaggtgtgtaattcatttacaggaaggtagggtaaataattggagaaataatacaatttgccgcatgctgtcatttctaaaccaaccacagtcaaggagcttgaccatgttgattggtttagacctttttaattggcttaatccaaattacatagtcttgaagatgggaaagattgctctcccaaagcaaaattagagtgtgtaagcagatgagagagaatagttactgagtagaaaaaaaaaaatctgtgggaggtctttgtaatcaatcacattaaaagtcctatcaaaataatctttaaaatattctaaaataaaaacctttaatgttaatatgacgttgtgcatgaagtttaaatggacgaaatctatttgccataaatcaatttccaaaagccacagctctagtaaaaactgtataaccaaatttcaagaataagtgtggtataaaatttgaggcaaaaagggaaactcttcactgaaatgtatattgtcaatgttagatgtacctgccatcttcatgcaatgtctaccatatcctctacagaaatcaagcaggggggatttaattctaaaatgtagcgcacatctgactttaattatgtccattcatgatatccaaaattaaaatgtgcagatgcggtcatatgttctaaataggaaacaactttttccaaagccctggcctaggagaaatttggaaaattatccaaataaaaattgaattcctatgtctgtatatgcaaatcagatccttatttagccaagattgttctggatttccacactggatgtcagtggattttccttggctactaaaagccagcttcttggcctgacttcaaaggtagtggaagtctccagaagtactatatttttttacctactgcaatagttgtgttctggagaatggacttgtggcctaggatttatgggttgatacctctcaacatttggaaaggctcagcaagggaaccactggcatccaaatagaattgatttacagagttattgccatacaatctgatcattttatttatgagtaatttttcctccaggtctttgcacacgaagaaagaactcactgcctcaaagacagaatacttctgaacgcaaactctattccttatctacttaagagctattttctatttctccactcttctacccttagttttaggcaaagttgccaactttatacccccaaagtatttgatcatgattagtctaagttagtaatctcattttcttcactagtaagtagcctgggggtaagtggcctagctctgacccatgaaatttaggtaccctgaggtaggggatcaaaatacagatgtttatttggtgcaagtctttggctgtgaccttccttctcagaacattggattgaggatgtgatatctggaattgtggcagctattttttaaccatgaggtaacaaataaaatgatgaaaatctagcatgccaagaatagtggagccaagaacaaagagccaaagttgttagagatattgtggagccactcaaccaaccccagaacttcttgttccatgttttcattggttaagccactattagatacattgagttgccgcagaaaatgccatccttattgtaatgcctatttatctgtggtaagactctggccaaatcattcaattgttcactctttatctatagaatagggataatgttatatttcctaagctgtcgaactatcttgatgctatttataaaaaaatattaaacacccggtacaataccaggcatagcaagaagtagctattaatataatcatctctaaatattggatatgtgcatggtgcctaatccagataattcatgctcatggactaaatagctctaacattaacacaaataacaaccactagcattaattgagtgcatggtgctaagaacttgacatgtattgcctgatttaatatgcagacaactttctgatgtgtatgcaattcccaccgagaacagagaacacgaaaagcacagagatgttgggcactgagcttagatgagggatatagatgtgatttagagcccagcaagttgttctggagcttgtcctctatgaccacgagttagattgcctatatttcagcctcacctgaagggctcttgtggctcacacttacttttcggaaatgcgattgaattaaatcagttcaaaatgtggaaatccatgtccatgctctattgccattctcagtctctgatatggctccagtctccacctcgtttcctaaagatagattggggtccaaagccaacagcccagcagcagacccttcctcacaaataggttttgtttggccaatccagcatttttaatcatttaacatctttagatgggacagcttgactttactttgtcatcatccctgtcactacttttggtcttaggtctggtcaatccatgctgatattctctgccttgcctcctgaggacttttgagtttgtaaccccccaacttccgtttttgtttacaaaaaagaaaatactagaaattgtgtcagtagcttaagaaatttaatttagcttaagaaatgtgatttagttgccaaatgttggggtgttctgcatgctgatttactgatgggcaactccctgaatcaaatggcaatacagagactaagggttcttctcgatttggaaaattcgggtcattttgcaaaccaatggtatgttctgtatgatgggaaagaaaatagtttctcagcagacgatatttttggaaataactaagtccccttcccctaccccctgacaccaagaacaaggctccaagaagctaggggtctggcccagcaaagacaagtgggaagatgcctttgactctatggtactttccagggaggcagcagatgaaagccatgtggtttaaagggccagatagtaaatatttcaggcttcataggccatttgtggtctccatcccatacattttatcttttaaaatatttcttccaacgctttaaatgcgtaaaatccatcaggcgtggtcgcgtgtgctgatagtctcagctacgtggcaggccaaggtaggaggatcactcgagcccaggagttgaaagccagcatgggcaacgtagcacgacctcatttcttaaataaataaataaaattaaaaggtaaagactatccttagcccaggagccacacagaaacagttactgagctggatttggtagtattttgccagcccctgcctgaggaaacaaaggaaattaaaaaacctctcctggccaattcactctgtcctgtggcagggaacaacacaaatgcagaaactgtcccagatgtgactggggccctgtacaaatggagtgaggcactgcaaaagaacacaagttgagagcagagtgtggtagatgggcccttccatccaagccgccacagacactcagaggcagaggaaatcgagctcactaggtacagtggccagggccgcgaacaacttagccatcagtttcttgccaagttcatttttcttctgaaagcataaacttcaattaagtgaaatggcaaatgactgttctagggaaaaattagatatcgcttaatgaggaagtcaattaaattcagtggtttttacactctcctttctacaaagaggacagtttctttatagttgcaggggaactggaaagagaactggaagctgtcatggttaccgtctctaacgttggactcttaagaaaatgattattcctggtttctagacaggccaaatgtaattcacctacgtggcagattaaagaggtgggcttactagatttgattgggtattgagcatgctctgaatgacagtccccaaaaaggacctcttatctgttcttccccttggggaagggattttgccacttccatgtcaatgtggcagttgagcttggaaattggtgcgttgtacaacataagcattacttctccaagatgtgcctgtgtagaaatggtcatagattcaaaactgtagctactatgtggacaggggggcaacaaggaccccactttgtaaaacatgttttgggggaatgttttgtttttcattttcttattacctggcaaaataatccaggtggtgtgtgagtcaccagtagagattataaagtccaaggaagtagaatcagccttacaaacagtggacctcaacgaaggagatgctgcacctgaacccacagaagcgaaactcaaaagagaagaaagcaaaccaagaacctctctgatggcgtttctcagacaaatggtaagccccttacttccagtataggaaacctaagatacctagagcggcttctgggaacaatgggctcatgccacaggtagtaggagacataattgtagctggtgtgtatggaatgtgaatggaatatggattgcatagtgagaaaattccctttcttccttctgattcaatcatacagaaagtctcagtttattgctaatattctttaacccttctttaatgcctgctaacactttttaacaaaaaaagaggtgcccttgggttggaattttttttatttcaatagttgtgagcatacaagtgatttgagattacatggattagttctttagtgtgatttctgagactttagtgcacctgtcacccgagcagtgtgcactacagccagtatgcagtcttttatccctcacccttctcccaaccttctcccctgagtccccaaagtccattatatcattttttatgcttttgcatcctcgtagcttagcccccaattatgagtgagaacatacagtatttggttttccattcctgagttacttcacttagaataatggcctccagctctatccaagttgctgcaaaagacattatttcattcctttttctggctgagtagtattccatggtgtacataagccacattttctttatccactcattggttgatgggcacttaggttggttccatatctttgcaattgtgaattgtgctgcaataaacctgtgtgtgcaggtgtctttttcagataatgacttattttcctttgggtagatacccagtagtgggattgctggatcgaatagtggatctacttttagttttttaaggaatctccacactgttttctatagtggttgtactagttcacattcccacctacagtgtaaaagtgttccgttttcaccacctccacgccaacatctatttctttttttcggccttttaattgtggttgcgtccaaattttggcatacaacagcatctaactggaagttactattattgcttactattatttatttttaaagtttccttctcttggtggtcaatgatactgcttttcttattatggtaatgatatgaggttttctttgaattacatttgtttacataaagaatatcaggcattttaaggattatgtatcaaatagtccaagttatataaagatatggcaaaaattctgaaggtgacgtgagtgacacaaatttggacaaaactagcttatagataaattaaataaggaaatgacaacataatattccaatagtgaaatatataacttagttgatgaattagccatgcttttaatttgtgtagaatagaaagaatgtgatagatatatttactgtttataaaaagcaatgcacattaaatgactaaacagccaggagcttaaataatataatgcaacaaaacctaaatcagttggagaacaaaaaacaaaaatgcatgtaaaaggtcattagtttaattctcttttaatgaaaaacaagaatttcattatagtgtgactttattttcaggagtatttggagtttaatcctttgagaaagcaactctctaatttcacaggctcaacctgttaaggaattctatctagcccacaaaacaaaacaaaacaaaacccttgccaatgggaactgaggcatattagaaataattatgttagaaattgttgacaggaatcattttcttttcctgttatattctcatggagtaaaaagtgtagaatcagttgtgggcggcccatatggccaaaaccccatctatctcattggccatttgatctgcaatttggcagtgaaaatggagattaagacttgagattttttttaaaaccaatttttacatgatgccaggaaagaaaagaacatttggcctgtttccggcaactcatctaacttacaaatgggatccccaaatatctcatcataatattgagagtgatcagcttttccatttctggatggaattgagaggtacagaaaaaaaaaacagtaaatagaatgatggtctcttccaaataaccaacatgaagctccttcatttaaaacagggaaaagtacaagaaactccaaagaaagcatgaaaaaaaaaaaaacctctaaaccactcacagcatccatctaaaacaaattcttaaattctaatgaggtctcatattacttaaatttatcccccagagctatctgttagatgctgtttgggaaaagtttttggcagtagaaaatgggtaagtctaaattctgagggaaacaaattgaaaagaaaagcgtcctttggaatcaattcgctataggatagggatgaaggtaggtgaggacacacttttccccagcaatccccaatggattcttagaattggattccatgctgtccattgttcttattaccagttgcccacgaaaaggcctgggaacacgaacattatctttgcaaaatttaaatcctgattgttggaatttactttaaaattccaggtattctaattatcgtctttttttctgttttgccttcattacaacactatatttatactgtgattaattcaaataaacaaatgaagagttttccagcttactaaagtccctaccactccctattgccacacccagtctagctcactcatttatgttaccggccctttccctgtgggtatttgagtttgcaatccctgatagagaaccgcctgattctttagaacaacttatttgaatcatattgtctggatttatcatactcaggttaaccattgctcaatggatggacatgtggtatgttttcaactttttgcatttcatgcattcactttttcaacaaataattattgagtgtccactatgttccaggcacaagggatacaacagtgagcgtaaacaggtgcagtctcccccggcggagaataaaacagacatttagttttaactctatcctcatattcagtgagcacacaccaagtgtctcacccacgttatttcagctgcttcgcaagcctgtatgaagatcctcacacacttacttctatgcacatgtgttaatgtccccattgggtagatttctggaagttggctctagcaatcattcttaggaaatactttttagtaacatgttcatagcttccaaactgattcaaagtcttcggatttatgcaggaaagaaaaaacctgccctaacagcttgaaaatagagacaacatctggcccatcgctaagggttttttgagcggttggggatgttgagccaaataaataaacgtttcagacaaattttggatattgttagcaaaatatcgatttgtttaaataattgatttaatggaagagagaactcagctgcaaaacctatgctttgattcaccaaatcattgattttctgctttctatcctttgcatttccctcctttttcttttttttttctttttgagacagtctcgctttgtcccccaggctggagtgcaatggcacaatctctgcccgctgcaacctctgcctcccgagttcaagtgagtctcctgtctcagcctcccgagtagctgggattacaagcgtatgccaacacacctggctaattttgtgtttttagaagagacagggtttcaccatattggccaggctggtctcaaactcctgatctcaggtgatccacccgcctcggactcccaaagtgctgggattataggcatgagccactgcatccagctagagatctttttctctctagaaatttactgctcataaaaataaaaatagaggccaggcgcggtggctcacgcctgtaatcccagcactttgggaggccgaggcgggtggattacgaggtcaggagatcgagaccatcctggctaacacggtgaaaccctgtctctactaaaaatacaaaaaactagccgggcatggtggcgggcgcctgtagtcccagctactcaggaggctgaggcaggagaatggcgtgaatccgggaggcagagcttgcagtgagctgagatcgcgccactgcactccagcctgggcgacagagcgagactccgtcttaaataaataaataaaaataggaaaagtatcatttttaaaataactatattttagggaaaggaaaacagaatcatgtaagtcctaacagtgcattcaacacatagagatgtagcacttcacagaaatcctgcgggctcctgcaggattttaaacaattgcgaggaatatctaagacatctgtcatgccctaaataggaaaagattcttatacatattaattcagctgtatgtcaagaaattgaatatttgaagtgctggtgtatttttataaagtgagtgggtagaatactgcattcatgtgtccacaaagcaggtaggcaaatgaaaccagaaaggtggtagatctagatacagttttatacttcgtcaatattaataacaccttacacttgaaaatgctttcctcctccaaactattttcacctaccttatttcatttactcctcctcatatctttctttggaccattagatttgtaagaaaatctttgttggaataatgttctcaggcttagagaaatactgtgagctttaataatgggtaaattaaaagtccaaatgaggaggcagccatgaaatcagagggttttttaaattaattacattcaatctagtaagtctaacaaaatctgttgaaatgtactattggaggtggaaagagggtggtctgtgacggtagttacaaaacagaaaaccgaaagtcttccatatgaaattcttctctgagcattaaaatgttaatactgatttgctctttaaggaaagatttctgaaggaagcattaatttggtcaattcctgtccctaccaatgacttgcattcctttctaccctaagagggtctctgtagtcgttcagcacttttcagttatcggcagtaacaacaatgagagctaccgtttatttattgtctgctaggcactttgcacgcagtatctcatttattaatagagaactctaggaaacaagtgctctctctgccccatgatggacataaggacacagagactagtgagtatttatgggatttttccacggtccgggagctggtaagcgggagagccagaattccaactcagtttgttgttttgttgtcattttgttgttctaaagctcaccctttgactcatgtgtaattgctgcttcctgtgcttctgcagctggtattctcagaaaggatacgaaggtagaacaaccacatgctccattgttgtgatttctttagtaatgtgttctatggaagtaccattttgatgcattgagctgttgcacttacctaaaatgacaataagggaaaggagaagaaaattaatatatggcttacttaaagcttgcacataggttttctaaatatatttgtcactaaaacaaaatttaccttggctggggaattttgcctgactagtccaattccatttcaagtgagcattgtggtaaaatactaagctcagatccattacctttgttgatcctagaaattttcagtagatcccattcttggatttgttttcatgagactggtctgataaacaatattgcagatatagtcaccatatattaaattttcagcccaattctttttcttttaaatgtcaattgtgtttgaattatattgccatcaaaatacattaacattcccttcaaagaaatgtgaactgaccaccaaacacttttgctagatttttgaatagctaagtgatatacattggagatggttcaaacattcctcagagtatcaagctataggaatgcatgacaagatgaaagaaataaaaaatgatttcattaatatacaaggcgtgaatgccacaagtagattccatctcaacactgcaggctgaatgccctgagatacttcacctttgactgtcatgaataaaaattaactccatgaagaaagttgctcaatatcacactggaaaatctctgaaattacttcatagtctttaaactgttcttcaaagtattaaatagtctctggaagaattttagtctctttaaacagtaactttgctatttttgacagctggaaaaaataagtttctatgtttatggttcctttgaatacagagttcaacatgaattattctgatttgtctctgcaaagaaaaaagaaagaagggtagaagaaaaggagggaagtgagggagagagagaggacgagaggaaggaaggaaggaaagaaggaaggaaggaaggaaggaaacagttgttattaataataactgctgctacagaagtgacttcagatggatttaataagattctaagtgtaaacccaaacttcagtcacctttgcatacatacagctttacatgcctcaaaataagcaataaagaaaaatcactgaaaagtttgagatactctctctctctttttttttttttttttttttttttttaagaagttgaactttgttgcagtaatctccctgacagcctggaggtctgttttcatgattcatgatgtcagctgagatcagctgctgtcaacacagccttctgattcaatcccaattcttctccaagggctctcaaagaaatggggggaaagaaagcaaattgaaaccttaaattgacagagtccctaatgaatgccaaattgaaacaactaacgggaagtttagaattcctgtctcctagggggcaagtgagagaactttattctctagaaggtggtggagtgctcatgcgtgactcttcatgtccattcggtttttgcctaaaaagccattttgtgcatttgtttgttttttgctgctcaacattcccaaaggttgacagatatgatccaaagccacagtgtaaaggccacttgggaatgggcttgagtaggaagggctcttacgacacagcccgaatttggaggctgaatgaaatccttacgtgtccaaagctttgggtgtgatgggaaggctgacagagctggttatgaggagggaagaaatagccaacagttcatttctttttctaaaccttctcaagcaagactggcctttgtagaacaatgcacaaggcacggaggaaggaaaaacccactttccatgtagacagatctaaattttatggagaggacagtctgatctttgtttgtcaatcttagtgaaacctgcaccaatgatgttcctcagtacacggaacttccagacaccacctctttcacactaagcagtatattaaaaagagcacaacccttctgtaatcccagtgctttgggaggccaaggctggaggatcacttgagcccaggagctcgagaccaacctgggcaacatagtgagactctgtctctgcaaaaaaattttttaaaaaatagctgggccaagcacagtggctcacgcctgtaatcctaacactttgggaggccgaggcgggtggatcatttgaggtcaggagtttgagaccagcctggccaacatggtgaaaccctgtctctactaaaaatacaaaaattagcagggcgtgttggcaggcgcctgtagtcccaactacttgggaggctgaagcaggagaatttcttgaacctgggaggcagaagctgcagtgagccaagatcatgccactgcactccagcttgggcaagagagtgagactctctctcaaaaaaaaaaaaaaatagctggacatggtggtgtacacctgtagtcctatctatctgggaggctgaggcaggaggattgcttgaccatggaggttgaagctgctgttaatgatgattgtgccgctgtactccagcctgagtgacagaatgggaccctgtctcttaaaaacaataataatatcaaaaataaagaagagcacagttgactcctgatgaggggacatcccataaacatccacatttgagtttggtcatcctccatcttatccaagcttttatcattttgtttaatctaacattcagcaacttcatacagtgaatgctcaataaacgtttattgattgagtggtgcctcttgccttctaggggcagtatggggaggtggtttagagtgtggaatatggagtcattgcctgctgtccaacactggcactcaaacctgctagttccatggtgatgctagtatctttgagcttccatttccttgtctgaaaaataaagtaattccactatcttaaggttctgacataatgaataaatgaaataatgcaagttattatctcatttagcacaatgcccagcacttagtaagcactccactaaaaattatccttcataaataataatttgtattatctctaatgtgaacaccgtagctcagacaacaaagatacataatattaatcagtcaaaaagtatttgagtgctttcaatgtttctggctgttcttagtgcatgtgttgtggattcttacggtctgctaagagaacagccatggccataaataacagtggaatctggagtcttcctctttgccccatatggctgaaaccctgctctctatactcctcccttagctgggaagaggagacattaagcagtgatcaaacgtgtgggaattagacctgagtcaatgttgttgataagaaccgaacattttatcaccaggtttcttaggtatcaggcactaagcataggacattactaaatgcaccgttaaaaccacagaccccagcatgagtctgaacctgtatatggccaacttgctgagagcggtggtactcaaactcagacaatcctcagcaccacctggagagcttattaaaatgcagatcattgagcctctgcctctgaaagcttctgattgattagatccagcctgggtctccagaatttgcctttctagcaagttcccaggtgatgctgaagctgctggtcctggaatcatacttctagaaccattagcttagagtgtggagtttaaggagtcaagtccaaccccttttatccctgtcactggtgttgctggctatagggggtgctaaagggtggaaaatgaaatattaaacaaaactcatatctctatcaaggagagaaaaaaaaaaaaacaataaaacacccacagcctaaatattcccagtggaaggctactcatgggtcaattgttcattcagtcttcatttaatatgttcaactatctcctgcttccaacattaattggaaccgtcatcatttatctcagaattgcctaattccaggatttagtacttttgttgttatttttggaggccaacacttgaatttaattagatctggttagaaattgcatggaaatctctatatccaatgagtaacatgtttccagttggccttccatttgtcttgaccccaaacctcaatgataaatgactgagatcatccatttcagaactttcttgcattctccacgtcactgtacttgtggctgaaggccattgtctgtttgttattttagtcagtgaaaggggatggagggatcacccactcagaagaaataaatgggaaagactccagctgccaagtaagtgacctcgaactcagtttggtggtgggattagtggtgtattctcacttcttcacagtatacttttcaataaaattctcagccacagccaactcatttaatatctcaggattaagcacctactatatgccaagaactatgttggggtctgcagacacaagcatgaacaagctagagttcctcagctttatcctatcaaaaaactttcacacatgtgcttccctcttttctgcattaaaaatctcttctcacccttcactttttgccataaatgtcacctcttcaaaaagaccttccatatctgcctctcataactacatattgttcttttatttcatagcgtcatcacaaattgtaataattcatttatctcccctgtttcttctcatgtctgtctggaatgtctgtggagcaagaagtctccttcttctatttctctatcaccttgcatggtgtttggcaagtactagaatctatgtcttgaacagaataaagacatggagtcggggggtcacacagtttgctttcattattttctttattctaaagaaacatagctatgacatatttataactacatgtgttcctttttttaaataggatcatgcagctgcactctttttttaatttaaaaatacacctccacaaaaaatggcatcaaatattcttctagtagttttgacaatatagagaagtggctacaagaatgagtggtagactcaaactgtctggttcaaatcctggctcagccacttttttttttttttgctgtgtgacttaggcaaattgccaaatctgtcagcacctcagtttcctcatctatataaaggagctatgaaaagtacttccttatggggttgtcatacttagatgaatcaatacatgtaaaacacttagaacatttctggtatagagggctcaatacatgttagctactgtattagtcagcacgggctgccataacaaaatgccataggtggttgctttaaaagcagaaatttattttcttgcagttcttgtggctggaaaggataggattaaggagtaaccaaatcagcagggtttggttcctggtgaggactctcttcctggtttgtaaatggccaccttcttgcttgtgtgtccttacacggcagagagagaaagagaataagcttgccaatgtctcttcttataaggacactaatcctattggggcagggccccaccctatgcctttgtttaaccttaattacttcctattccaaatataatcacattgggagttaaggattcaacatatgcgttggggtgggggcacaactctattgttaacagtgtctatatgttactattactattatgctgctgatagggaatttccatcttataatgttgcccatatcacactcacaaatggacggtaatgactgtaaatatgtttttgtatttttatttccataataattggtttatcctacatttttaaacaggaaatatattgctttttactatactcttcatatttaagcttttaagacaagcttaaatatgatggtatattttgtctggaattttacagtgaaggaattatgccaataatcttggtgattctaaaattggaatgacatccatacaaatccaaataagctagaaacatcccacctaggagtgttttcagaatccaattgggaattttattttccggagccttggattcagacttgagaacactggtgtgtcctttccatttttagctaatttaattctcacagcaccataaggtgtcatttcttttattgctcccatagagatgaggaaactaggaggtcagtttatccttggtcacacagcaaggttatggtggaattagaaacaaaccaggtccttctgactccagacactgagttcttagccactcactgcatcttaaaatcttctacacaacaaaaacagttaacaaggcatttgaactgggatctctggtttctggcctttctgaagagcattgtggtgagagtttctgtttcattctaaggagagtatctgctctgggatatctattgtacttggacatccatatcttagcatttgctgcaactctgacagttggggtctgccagaagtgttcaagacatatattacagaagagcttctcaaggtacactggatgcctgttgcttctttctccaaggacttctgccctctgaagagcaccggtggaggccttctggaccggggagtctctgctgtttgtcttcccgcttacttctaaggggcgtgcatgattcactggtgtgaaaagaaagttctcctacagttgatgccttctccatcaaagctgctaccttgttgtagaactttttacctgggtacagtacataacttcatgaatcatgcttatacacatgtatccggtgggtcaagtgtgtttgccagttgccacaatcagggctttaaaacttttgaagtcaatatttaaaagttgacattttgcattttttaaaatttaatttcaaggttgtcttgaaacaacagaagctctgaccacactggggctgcaagcctacgtggtatctcttggctggatcagagcaactgttgccctttggacagggcatgtaacattcagtctcccctgctctaaattttctccccaacatcaaagccagccttgcttgaactggtgcttttcttatactggagaaatatttttttggacctttgttgcttttgcagctggagaaataagatatccacatggttattcttaccccagcctgcatttactagatttttggattttacagcctcatctcatcaaattattggaagcatgtgggattgtaaacctttcagtttgacaaaaaacgatatacattccaaactaataaaacaatcatctcttttaccaccatttcatgaagcaaaaggacaatttcacaccaaaaattagggtagatgtaattatgaagaaaagaatgggcatccccaggaaaacactcgcatgtggttgcaagtgggagtagccccttcaaagctggcttaagcataaaagggctccaggaacagctagatctaggaggcacgcatgataccatcaatgcctggtccctctctctctctctctctctctctctctctctctctctctccatttctcagctgtgattttctctgtgttggcttccttttcggggagattttccctagaaatattggtggttctggaagctccagtcttacattttcacagcttcagatctaacagaaagggaaccagcctctctctcatttcagcaaagctctgagattagctccagtgttatctgcatttggctatgctgagccaatcacagctggccaatcatatacaatgctctgattagtcaggcctaagtcacatgctcttgtctggaggtggaaatagtttgcctggaccacacggagtagatgaggaagaagggtgtttccccaaggaaaagccaagttctggttccagaataagggataaagagtgctttctgggatagcataaaatgtattaatgaattattagataactaaataaatgtccccaccatgacttcataagtgcacattttacctttttttatattcatttcacctaggattcatgaaaatgtagataccacccaacatttgaacatctctgttttaacatatttattcccttgctattgagagttgtcctgcagccactaaaaatgtactttgtttgaaattgctgtagacatcagactccacagaaaagactatcacaccgccagagcctgaaccaacaggagcaccacagaagggtaaagagggctcctcgaaggacaagaagtcagcagccgagatgaacaagcagaagagcaacaagcaggaagccaaagaaccagcccagtgcacagagcaggccacggtggacacgaactcactgcagaatggggacaagctccaaaagagacctgagaagcggcagcagtcccttgggggcttctttaaaggcctggtaggtggattttttttgcctcttctttctgggctctctccttccccaacaccatctgccccagtcagtttttcaaattctacatgtggctcttcacactgggatcccgggtctatcactcagggtttttgaactgctatgtgacttccagcaggttcaatccttctccattttacaagctgagaccttgagcaaattattgcctctctgaaccagattttttatctgttcatacataatgatgcctaactcatagagttcatgaaacaggtgagatactgcatctagtcacctagcacagtgcctgagacctagggagcaatcagcatgtagaagtaatcgtcatcatcaccatcaacatcatcatcagttttgttcagtgtcttgtgcgtagcagatgctctgggtaatatttgttgaatgaatgaatgaatgaatgcattattggctgattttatttacattatattataccaatttgacgtgttaaaaaaattagacaaatcaaatttaaacacactttatgttgtgagcaaagaacagttcatgaattgggcagcactcaaaacccaaagaggttcagagagcactgcccagtggcatgagcagtaagattttataggccaaacatggaagcaaagtagaaaacttatctgattgggtacaatgaggtgtttgccttatttggtcacgatgtgatgagttgtctgccttatttgggaatggtctgatcaattggttgcctgtgattggctgaagctcagctatttgtgattggctgcaacatggctatttgttacaaaaaaaaggatactcataaggtaggttttggtttgtttacttactaaatgtggttgcagtttgttacatagacactgggagtaaggagactgcctcaggctaaaggcctcctgcttatttaatttaacaggggtataaatgcacaattgtgttactccatggactatagaatcaatggctgctagatgcagaggaaatttttttactgcttgcaattttaggcagactggtggggaggtgttttagatgtgcttattttactctcctctacaaaatggaagcccctcttcaccactggactcccagctccatgagggcagggcaccacctttcaggttcaaggctgtatctcaaggacttgaaataggactgcataaacagcaggtgcttgatagacaaaggaatgaatggatgagattaaaataatagataccaaaatatgatatataaagttggaatacattacttgaaattgttacccttcgataaaacattgtactcaactttaaccacacttaacaatttctacttgcatgtttaaaaaatacccactttgagaatggagacactgaaagtgggtatccactaatcatttgatttacatatggaaaccactgaaatttcttcccttccttccttccttttttcccttcttccttctttcatttttcttccaaaaatatttattaagcattccatctaaagcacattcacactcatagcttctctctcctatcccacaagatgtaatagttccttattagcttcttctttctgggtgtagtgcagtcttcaaactaatcatgtagtccttgcagtggtttcattgatgtgaggaaggcagatgttgatgtaaagcaagaatgccagtttgtagccctgagagaaggacttcacccaagtgggtgaggctgtattggatttgccaacgcaagtcttctcaaaatgtactgtgcacacgaatcacccagggatctattaacacacattctgattgagtagttttggggtccaacttgggatgccacaaagctcctgattgatgctacaaaagctgctgatccagggatcacactttgagtagcaagttcctaaaggaccaggaaagatgttggggaaagtatttggatttcttgtagtttacttcttttgtttttttgagatggagtttcgctcttgttgcccaggctggagtgcaatggtgcaatctcggctcaccgcaacctccgcatcccgggttcaagcgattctcttgcttcagtctcccgagtagctgggattacaggcatgcgccaccacgcctggctaattttgtatttttagtagagacgggtttctccatgttgctcaagctggtctcgaactcccgagctcgagtgatccgcccgcctcagcctcccaaagtgctgggattacaggcatgagccaccatgcctggtcttagtttacacgtttttaacccatgatttattcattcatttaaaatgaacaccacccagggaatgatttacactgtggcttctaattattttaatagaagccagcctctacaataggtacgaaggctgaaaaagaaagatggtatggaaaagttcagatgatttctaataatctggtcattcacttaacaaatatttgtagaatatttagaatcctggcagtgagctagaccaggggtattaaaaatgcaacccttgtttctataaataaatttttattggaacattgccatgttcattcatttacatgttgtctagctgctttcacacaaaaacatgagggttgactagttgcatgactagggttgactggttgggttgactagttgactagactgcatggctcataaggcttaaaatttttgccaactggccctttgcagaaacatgtgccaagccttgaactaggcgctggaggtatattcagcaaacaaaggggacagggtccctgacatcaggggttcatattcgaaggggaagcatgcagctaaaaagtattagtagataagtttaaaaacaaggttaaaattattaaaactacaacgttaaaattacaaaattaaagacaaaatttgccaacaaaattgtaggtctgggagatcactgagggaaataaacaaggtcccgcgatagagtttgcctgagtatggatgggggggtgtgtgctacttttgcctgagtgtgtctgggggcggggtgtgctacttttaatcggtggatcccaaaattgtctctgaggagatacatctgagatgagacaggaaaggttaaaggtgccagacaggaagagagcaaggctctttcttccaggaggaggggacagccctggcaaaggcacgggggtgggaatgagcttagtgagcttagtacatttcaggaagagaaacaaggccgtggttgctgagggtggagaggtagggtagggggagaatgatggaagtaagattggagccgtgggcggggacctcctcatgcaggctgtacgggctgtgcaaggaatgcagacataatcctatctgagcagggaagctactcacagatattaagtaagaagtcttggcccctgttgataacattcgaagattttattttgctgctgtggtggagaatggctgttgaaggtcattaggagctagttaatacaggtcatatttcttgggagagctgatggagattggcctggtgattcctgaagaagtgacaagaagtggacaggtttgagacactaattacagttctagacaccgagtccctcctctgggaccacactcctttacagacctcatctctttaggatggcagcatcccttcaggctgggactgcttctgccacacctcccagacacataagccaggcctccaagaagctgtgtcttttgctgaacattccacaggttgtcagagacagaggcagcattcagctcaggccccctagaccccaagtcctgcatcgtcccagtgtcacaaggcctccagcaatgatggaggacggaggggggcttccctgccgctttccaaagaccaagcctcgaagactttcaagctggacacattccccagggttgcctgaccgccttcctgggaggggaatgctggcagccgagcctgtcaccacccacagaactattgtggtgcctgttacccacaggaaatgagacacaccgcaggccgatccctgcatgatctttgtctcacagtgacgtcctcgttagtcaggtccttttttcctccttctccatcatgctacttgagttctaactgagagcaacccacttggttttcaaaaatctgaaaagaactggaaggaagcccttggcattcacaaagtccaactgtttgaaaacattttcctttctttttgagcaaagggacttttttgtttacaaaagaaaatgtcacaaaacctgggtgtgtgtgtgtgtgtgtgcggatatatgcatatacgcacacacagacacatatgataaaagtgaaactattctgattgatggaagactgggtttctcccttcccctaagcaccacttctttgatggccctttcccagccttcccctttcccattttcatgagcccctgaagtgctagattgtgtgcagcgcaatctgcaggcaggtttagcaggtgaacaaatggaggcttgaaaagggaagacatctgtccacactggtgtgggctgaaccgaggcttgtgacaatcagcgcagtcactgcaaggagcctgagaccgagggttggaaagagcgggcagtgaacagaagagagccggggacaacaggtgagctgagggccagattccaagtcaaagtggccaggccgttaccgcatgacctagtcctaggtcatcttggagcctcagtttctgcatctgtaaaatagggtgaataataatcactgtccacctcactgggctggagagagaacaggtaagagaatgggtctggtttggccttgtgaactgtgacgtgtagtcctggtatataaggcaggaaaggggttgcatttatgtctctggcctccaaggtggagtcccagtgaggccagaagggcatgtgtatgtatgaggccagtgagtcaggtgtggtctgtggctacctgaagggcaggtgcccacctaaagggggtgcccctcctcagcaccagccacatgttaccttgggggactgcagacccattgtggcaggacctgtccatttagtcaagagaaaataacaaaggtggagaatttttaagagcaaatacctaatttttaaatgccagcatctaatttttttttaataaatgaagaaaatgcttgtacaagttcatctattgcaaagttcaggcccgtggcagccacttggccatctgagtttgctgtttagtccatcaagccccaagatcaagctcatggaacctaaaggatggaaacctcggggaagtaagctttaatagaggtgagttgactgggcagggtggagcctgggtgaaccaggatccacggcaaggcacgctgggcaaacagaggcaggatggatggctgccacccgtggccagcctgagaccaggctctagacacttgcaagaagcttgttcctggacttgaacctagctctcatctagtggctgagtgagcttggacctgtcatcttgctgagtttcagataccagatcaatgaagtgaatggtgctgacgtcacagggttagcatgaagatgaagggcagtagtgtacaatgcccttagagcaatgcttgtgaggtttaactagtcaggaaaggctattttgtgagtattatttagttagcccctgccctgggttgtaaaggtgcagagatgagtcgggcaccgctgtgccatggggagtttgtgctctaatcacagcaacaagcgattacaatgcacggtaaatggaggggttggggaatggcctttacccagctcagggttcagagatcggggacagaagccggcaccccacttactggcaggaatttgactgaagtggcttgggctcgctgggcttcagcagcctcctctgtagcctgagagcgacagtggcgtcaacctcgtgggctgcagtgaggaccgggtgggatggcagtctaagacctcacacagatgaggcagcaggctctcagcggtgagggaccggccagaggtcatgcaaccagaaagggatggagcatccccaaacccacagctgactcctgagcccaagcttttggtatttcacggtgtcctggtcatctcttgatgccccaaaactattaataacacaatgtattgtctgcagtaggtcctcaatatatgttgttgaatgaagtagtgaattcaactaccaccactaaaaataatcataactcttttatcacacttactgtgtgacaaagattgttcaaagtacattgcatatactaacacttaatcttcaaaactaccctgtgaattcccattttatcaacggtaaaattaaggcttaagtagagggttaagcaatttgaccaaagtcacccagctaggaagtggcaggtctggcgttcaaagaccagcaatctgattccttggtaaattacatgaaattacactacactatgtagtaaatacaatatactatactatgctagattatacagggcactacacagtctatgtactatatacatatactatatatgtgccctatatacatcatgtatactaaactacactctatttattatgctataatacactctatatactatattacatattatacgatatcatgtatattctactgcattaaaccatatgacactatgtacatatactagaccatacatactttgtgatagtacattatacttccctttcctatactatatactatagtgttctgtatatatcatactatattgtacattatgctttgctatactttatttactatactatacagtggactaaactatactgtgctatagttaccatacttgactatactatatatgtatactatatatactataaaatatacactaccctatattatactatcctatattaccttatactacactatactatctatatatactatgctacaatacgttattatactactctatactatactctctctatgtgtgtgtgtatatatatatatatactgtatacaatatataaatcttatactgtactaccctatactgtcttatagtataaaaggaggcccacaattgatccatgcagcaaggtggatgaatcgcacatccactatgctacatgaaagaagttagtctgaagggctgtgtatactctaggatcccatgatatgacatcctggcaaaggcagaactctagggatgaaaacagatcggtgcttgccagggtctgcggtggggagcggttgaccacaaaaggcacaagaaagatctgaggggggacagaaccatgtgacatgttgatttggatggtggttttagggggctatttgtgttggtctaacctcatagaaccaaatacagaaaaggttaactttactacttataagttatacttgacagaaacggtaaagtaataataataataatagtactcaggctaggcatagtggcttacacctgtaactccatcactttgggaggccaaggtagaaggatcacatgagcccagcagttcaagaccatcctggacaacaaattgagaccccgtctctacaaaaaaaattttaaaattagctgagtttggtggtgtgcacctgtagtccaagctactggggaggctgacgtggggggatcatttgagcccaggacttcaaggctacagtgaacatagtcccaccactgtacttcagcctaggcaacagagtaagactttgtctcaaaaaaataaaataaaataattgtatctgcctgacaacattccttcacccacattcagtcaatgttaaggctaggtaccatgtgctaggaacctgcaaggcactgagacacgcagaatccttgcagcttccaatctggtgtagaagacagatgttagacaaataaattagataataagatcatttcagagagtggtatgttctgagagagaataaaatagggtttgggatggggggttgggggaaggatagcattaggagatatatctaatgttacatgacgagttaatgggtgcagcacaccaacatggcacatgtatacatatgtaacaaacctgcacattgctcacatgtaccctagaacttaaaagtataataaaaaaaaaagaagaaaataaaacagggtggtgaacctagatggtaactggggagggagctaaagtgaggtagaattagtaccccctaggtactaagtacattataagcatgaactcactttatcttgggaacaaccctctgagataagtttgtcatttccattttaaagataaagaaaccaaagcgcaaagagatgataagtaatttgtccaagatttcacaaagctagaaagtcatgtaactgggtatcgaacccgggcatctgactggagaccattctcttacccagcactgaggaatgagatatattaatttagcccaacacctagcacagagtaagtgctacataaatggccattgttgctgttgacattacagagcttcaataggctgccacgtctttctgtttttctccagggaccaaagcggatgttggatgctcaagtgcaaacagacccagtatccatcggaccagttggcaaatccaagtaaacaaatcagcacggttcccaccaggttctcctgccaccaagatgtgttctccttactccatctcctccccaaacacgctccatgtatatattcttctgatggccagcaaatgaaattctgcctagaaattaagcccgagctgttgtatattgaggtgtattatttacgtctctggtccagtcttttctggcaaataacagtaaagatggtttagcaggtcacctagttgggtcagaagagtcgatgatcaccaagcaggaaagggagggaatagaggaatgtgttcgggttaagtgatgaaaatggcagtggtggccgggcgtggtggctctcgcctgtaatctcagcactttgggaggccgaggcaggtggatcacctgaggtcaggagttcaagactagcctggccaacatcatgaaaccccgtctctactaaaaatacaaaaattagccaggcatggtggcacacacctgtagtcccagctactcgggagcccaacgcacgagaaccgcttgtacccaggaggtggaggttgcagtgagccgaagttgcaccattgcactccaccctgggcgacagagcaagattctatcaaaaaaaaaaaaaggcagtggcaagtaagttatagaagagaaatgctgctagaaggaattaagcgttgtagtaaatgcgtgcttatcctctaagcttgaagaagggagacgaaaatccatttgtttaaattcacatctcaaggagggagaacccgggctgtgttgggtggttgccaatttcctagaacggaatgtgtggggtatagaaaaaggaatgaataagcgttgtttttcaaatagggtccttgtaagttattgatgagagggaaaagattgactggggagggcttaaaatgatttgggaaaacaattgcttttgaggctcagtgacaacggcaaagattacaacttaaaaaaaaaaaataaataaaaaataaaggaagttgcacggttattttgcaacacaagggggcggcaaggtccccatttttatcctgtaatactgtatccctaacaaagatttggtctctgctatcttacattattaatgtttctcagatggctgaggggctcgcttcatctgttccgtctgacacttatctcaagtgtgtctgtcattcctaatgttctcaggatgtgctctgataaaaccctccccataacctcagttaataaaaatttacagaagacttctcaaatacctgagttgtttttaatacctgtacaaaggagtaaataggaccctgagtctattaaaatgtaattcaaagtagcatatgattgactgacagtcatgtaaactgtatctttctttttctgatttaataaaaaatacatttacttctaaagtatcttttaattttcaacttcaaagcagtcccactctatatctgagatgactctaacttctacattataaaatccatactctttctccattatcttctttggaagatcattctctcccagatcttcccggatttccttgtatatgggcacacacacacacaaatgtgtgcagttgtatgtttgcatgtacacacacatgcatgtatagaatagtgctgtcttaggccaggttgcttggagcagagcctgagatggggatttggacgcataggatatactgagagtgggctccgagggaaagggagtaagagaaaaagaagagggcaagaaaagagttgggcaagggttggtttcaactggagcatgaattgcaccacccagatagtttgaccttgagtcaagggagccagcctttgaaccctggtaggtgaattctgggctgccctgggaggtggggggatgggcaagcggcccccattgagctgagaagctgggatgcctaagtaactggaggatgagtgcattgacagtgtccactacagatacacacctatatgttcagatacatatttatacccatatttgcatatatatgcacatattcatatatataaatatatatcatgcaggaatagatccatgcactcacacagtcatatttacatacatgcaaataaacacatgtaactaacacagatccacacacacacattggctcacacaaatctatctcatatgcaattcatcacacattgatcggagataaacattgaatatactctcctgatgtggatggacctcgactctaaggacaagtttgctgcttaggcaaattacaccacggctttggcaaataggcatttggaaaatgtgttcagaaaaatatggtatcactcaaaacccaagcgtaagtgaggaggggatcctgagctgctggggcctattagctcccagcttggacaggtcaaattcgtgtttccaataaagaccagaggtcttttccttgcagctgggttagttttttcaaacctcctgaccatacctcgagattactcacacctgtgcctcacccagttgagaactatctcgtgccgcttagtatcagaatgcttaacttggcatgaagcaggaaaacagcacttggggaagccattggtgggaggcccatcactgccatcgtcagagcacggggtgattcaaggaaaccaggcagctgctattcctttgtctccaaacaccgtgggggttgtctgctgcaacctttggtgagctcctgagctgcagtccattgaggaaggtgacagtatcatttgcaagtttcacctcgctgggtacaggggctttttgcccagataagaaatgcccctaggcaggaggaagagaaacagactgagtagcccaggccagttacttagccagttactaaggcagatggagccctcccaagcccccactcaaacaaaacaaaacaaaataaaacaaaaaaaaagcctctttgctgagaatctctctgcaaagcatgccaacagtttttataactggtttcctatgctcctgggccaaaaaagagaatagtcttttaatgaaattgcttttttttaaaaaagcaagaaatgccagagagaagtaaagcgcatgacttactgggagaactctaaattcagttatggcttaagaaacaagttaatactccatttttgtgtttgtgtgtgtgtgtgtgtgttattgttgttgagatcccatttccaatgcatttacaataaatactaatgcccaccccttatgcagaactagagtgaaaaagagctgaaactcaccaataaacccaagaaagcctttaggacacagattcccagaaatgccatcagacagaacaagcagtgggggaaataagcaaagcaaaggtggcacacagaaaaacatgattaaaagagaaagaagaattaagacctgggggagggagcaaaaatgactttcttattattattatttatttacttattatttatttttaggtacacagggaagtgtgtcttctcccatgtcaagaagaagtggcctttccaggaatggagctattgagctgaaatggctgccactgcgcgtacacacacacacgcgcacacacacacacacacacacacctcccttccagttccagctgacggtgactttttgactggtaaccataaaagaattcattcaaaagggcagttgttcccagcagccagtgaggtccttcctgcattcgttgtcttggagaaggaggcacataacaaaatagaaaccaaaatgggaaggaaaagagaaagaaagtgaaattcctggtctttgttgtatgtatccccttgctttttagataaattatcaggggtttaaacacacactctctcccctccctcctcccacttcacacacactagattgttcttgtctgtttgcaaacagtccagaagcactggggtctcattaaattagattctaagtgtcttaaagaattagatttcaagaaaccaagaatctgtgtcctttcccttctcagagtgcctggaagggtgcagatttctccaatctgaatctgacaatgttatttcttatgtcagataatcccaagtagatcttataccttaaaaaaataaaatcagctacactacctaccttacagggaaggaaaaagaactaattccaattattaactaacccaagatacaaacacaggggaaactagggaatgtgctttgcagcaatgtaagattataggggttggttttaaccatcctttgaatgtccctctttaagcctttttaaagggcaattttgcacggtgagtagaattaggcttctccgtggtcaagattttgttcactctatcagtgcaaattaagtggcaccggcccactggaaattatagtctccattaggaagaaaagaaattacttaccgagcagcaaattctctaaatttgtaattcagatctttagtgcagaatgccggtcaggatccagccctttgcataaattggttttctggggagtttaaccccttagcctctgttgcccttttcttgaatggcattcacgcaaccctctccatctcctggccctttaactggccccggcagaagttgcagtccacaatttcacagaagtaaggataatacattatcacacattaccgtttataaagtgctctgggtacaatctgtaatttaaagctgtatttccctcactgaacttaagtgcttcctttgttacatttcattaccgggggactggcatgcacctgtatagattttttttttttttttcattttttgttttgttttgtttttccaaataagcacttcttgacaaaatggcccccagctgcacttctgctaatgacagccatggaagggctggttccttacgtgatctactctctcagaagcttgcttttgtcaaaatgcagccacgtgggggagctgcaggacctggggttttacaatgcctagccctttttccctgattgcctaaccgggaaactgggccaaagcagcctgagagtgtatttgttgattaacttctagaaagcagtcaagtttaattaggagaactagaacgagaaagctgaactgggcaagtcagttgccttctatgattctcagtcctccaaatgaagataaggttggttggtttgtgtttccatccttatctgctctatcttggaagaagctcaaggaagattgtgtgattgcaaaacgtttcagttggtgtcattgcaatgcatttaagtaatccttactggcccatcctgctccacaaagcagccttacctctcatcttctccactcccaactaaagagcaagtgatttaaactctgagtgtcctccctcaacaatgggctaataatagagcctactcgtggagttgctgccagcatgcagtgagatggtgcataccaaacatttagtgcagtggctggcacattgtaagcacttaggaaaggcaagctattctatcatggggaacttttagcaccaagtaacagaaaacccctacttgaattggcagataatcgtaacaataagggtatttatcatttcatataataggtgttgtataacatctttggctttgattctctgagactctcttccagctaacaacgataatgaggaaatgtatcgtttcatataactggtgttaagtctcatagcctggctctggttctctgacactccattctgccatgttccatgggttgacttcatcctaaaactgtgctgaatgatggatgcagttccaggcaaggggattatgggaataccataatcagtttcaatgaatcattttggtgaaatcatgttgagaaggcaatacaatgatacagtagacagtaaagccattattggtatcagtggctttaaggctaaccattccccaaactaactgtgtcccttcaattcacacccatgggatttgtgtaatgacggcccccaccttccaaagcagtgccactagaatgtgaacttatcaagatctgaaccttcttgtcttgctcattcattgttctattgtcagtgtctagcacaatgcctggacatggtagatactcaacaaatattggttgaatggataaattgctaaacaaatatcctgtggccacacccattgtggattgccttatcctctagtgtgaatttgttttagctctgaatgtctgatcaccctaaccagacatctacccttcccaggtaaccagcccagtggttctaaaagtacagtcccaggaccagcagcctcagcaccacctgagaacatgttaggaatgcaaactctcaagccccactccatacccgcagaatcaaaaactcttggggtgggacccagtaacctgtgttttagcagcctctcaggaggttccaatgaaggagaaaatttgaaaaccactggtccaggtagagctaccacttcactgagcatcaacagcatgtttggtccaaagactggccctgaagatgcttagataaaaaaagctaacattgaacctcactatatgccaggtattgtgtgtcacatgacttaactttgttcactgcttatttggcagctgaggaaactaaggctcacagagaaaaaaacaactttgcccaagaacacacatggcagagccaaggttgaaatccaacctaagtacataaaagcttgctttcatgtctgtgggagagacaggcaggcaaaaagataataataatacaatgtaagagaagcaaatgcagggtgtcatgggactcaggggaaggcactggcgcaagaccacagtgggtggaggttggccactttggggaggtgacagttgagttaactcacacagaatgaataagcgttggacaaaagggctcccagaagaacagcaagtgcaagagcccagggtccacagagagaatggcaggtagcttagcatggctgaagtgagactgtgaggagaacggataagaggatggaagctggggaggtggcacagatggatctcaaggacttggagtaaaaagtccatagtaacgagtttaaattgtctcttgacggcaatggggagccatggaagatatttgagctggagggtaacatagatttatattttggctgcaggtaggatctaatacaaaagcaattcaactaatattcactaagtgacctgagttatctgtgagatatttattataaggtgttaaacttctttgaagattgtaagaaagagataaaacctctaaatggttttgacccttcaaaggacatttaaatggttatttctaagtgtcataaacatggacttgggatttggcctcatcattcacccagatgattcatacccatgatcccaggctgtgaggtcttgagcaaattacttcttctcagagccttagtttgttcctctgtggaatgggaatgctaacagcacttacctcggaaagttgctgagaataaacgagaccgtgcatttagagcatgtaggcaccgtgtctggcaggtaatgagtgctcagtcagcttattgatgaggatgcagatgacctcagcctgagatagaacagatgtgttctctttcatggactgaaggccacccagactttgcgacatccttaaactttgccccagtttctccttatcctcataagcagttggctggctggcttatctagaaaaaagaaaggagggaggagaaaaagcaaagaaaaatgttcattttccctgctgttcaccccattctaaagtaaggcagaatttctggagagggggctcaggtccacccttggctatccttggttgtacagttgcatctacttataacggtggccaagtcgccatggcagtaggtgctgtggctgccctgccccatcgtcttcagactacccgagtttacctgcagcactgacagcttcccaccccaaaactcctcgttctttgcttttcctctcggtggctttctccaggggctgtaggagcttgtttagcccacctgcatggcattttgaaaatacctgaaattttatgccccgaaggacaattctcaatcagtgaaagatgggagaggaaaggtaaacacctcagctgccccatctctcagtgggacaatgttgaggggtcgtctttgtgttctctcaagggtcctcagcaagaccgagccacccgtcacccacagcagtaacatactcatgagcacgcccccccaccccaccttttgtgcttcctgggatcacttcccaaataaactacttgcacct

SEQ ID NO: 709 - DNA, 5008 bp, Homo sapiens
gagtcagtgtcagcccgaaggctgaaggaaaaagagcaacagatccagggagcattcacctgccctgtctccaaacaggtgaggatggggaataaagtgaaggcagtgctttggtgggaacttcaaggatagcctctggctttttccaggtttagaagctcatatgagacaggggtggaggaaaagaagaaagaagaataagaagagaaagttgaggccctggcccaagttagtgggaagggaaatccacccccattaaactctctccctggtggactgtggggtgcacacgtgaggcctgcacaggtgctggaacatggtagaggcccaggacatacttcctgtgaatgaatgattgagcggctgaatgaatgagtaccactaaaagccctcttttctattcccaaatgccacattgagcagaagggagcaatccttgctcagcaattggtagtccctttgggtgtgcaaatgagtccacagcctgcaacagcagacagtctctgccccccttagaggcgattgcagggaggtggctgaccgttgatcacacccagagctggttatgggaatttactccatggaaagactgcaaaactgcctgaaatgtgttttggcatcagctactgacacgtaaggtttcccaatcctcaactctgtcctgccagctgatgaggggaaggaaagggattacctaggggtatgggcgaccaatcctgagtccaccaactgaccacgcccatccccagccttgtgcctcacctacccccaacctcccagagggagcagctatttaaggggagcaggagtgcagaacaaacaagacggcctggggatacaactctggagtcctctgagaggtaaagagccagcgaagctgatgtcctgtcaagagcagaattcctgctcattcgctgcctttgagagtggctgtgttgtgcatgcatgtgcatgatttgatatgtatgagagggtgtgtgtgcatgagtgtgttgagtgagtatgtgagtgtagtgtaagagaggatgttggcactatcaggtaagtacgagagtgtgtgtatgtgggcataggtgtgttaacatgtatgtgtttgggaacttgtgtatgtggaaggggttagaaggcctagaagagagaggttgatgctttcattctggaggaaaatactgaggccgagcctccatgggtgccttggagactccaagccttgaatccagtgtggggatatgcaagctatgtctagcgagggacacatcctctgacctcaggaacctcccaggtagttgggaggaacctggttccaacctcccaagaactctcagtctgatgaggtacaggggaggtctcattagtgtatcatggggttctccacaggtctgagggcctgatgtgtgtgaaaccattctgcagagctgggaacgggtcaggaggtggttgtgtgtgtgtgtgtgtgtgtgtgtgtgcattgctggagggcactccttgtgtgctctgagtgtgacagaggaagtcaccctggacttaggttggatgggagagcatgtctgtgtgtctcagagccaccaaggaggagcaggggagcgacggccggggcagaagttgagaccacccagcagaggagctaggccagtccatctgcatttgtcacccaagaactcttaccatgaagaccctcctactgttggcagtgatcatgatctttggtaagagctgaccctgacctctgagcatggggggacagccccagaagggaagcactcttgtcccttagttttctctcccattgcagtgatcctctctcagggggaaaaaagaagccatttgggaggaaggagagtagcagagaggggcagagagggagggcgcagaaccccatgccccatcaccagacaactcccaaatttccttccaggcctactgcaggcccatgggaatttggtgaatttccacagaatgatcaagttgacgacaggaaaggaagccgcactcagttatggcttctacggctgccactgtggcgtgggtggcagaggatcccccaaggatgcaacggatcggtgaggccacctatccctccctaccctcctagactctggcccaggcagggctgggagctgcaaagacagtgccggttcctgatgggcgcagaggtctcaggatggcctggctggaaaagcagccggcatgttggaacttctgctctagactgttgcaaagtcactgggtctctgcccagggtccaagggggtgagaccacaggcaccaggcctcctggagctgtgggacaagagccccaacagggtgtctcctcacagctgctgtgtcactcatgactgttgctacaaacgtctggagaaacgtggatgtggcaccaaatttctgagctacaagtttagcaactcggggagcagaatcacctgtggtaagagtcctacctcaccatcgagtggccctcatttgtttagacagtgctggggactgtgctgggcaccaaagatagacacagagggacacagttcctgcttcaggaagctcacggttgagtgggaagccaggaaagtgaaaatccaatgtagtaaagactccagtgggaagtaaacaaacagataaggcattaacacagcctgaggcttgaggaaggctcctggaaggggtgacccctaagctgagtctgaaaggctgtgcagagagtcagggaagaggagggagcattcccagaagaggacacagcatggtcaaaggcactaaagggcactgtaagccattctgtactgcccagcagaaacatgaggaagaggagcagtgctgagccatgatgctggagacataggaaggagctaggtcaatccggccctccaggccgggctgtatttaggttttgccctaaagcaataggatgctattaagcaaaggagctacagggtcagatttgcattttagatgactcactgtggggacagggtcgatggagacaagtggaaggggggcagagaaagctattgccatcatgcaggcaagagggagtaacatcttgacataaaacaatggaggtcaggatgggaaaggtggagaaaaaatcaagatgcatttgagatggaatcagctgaactggtgactgagttgggagggatggggagagggagttgttggatggatatgtggctgcatggatggcacaactgtgataaagaccatgggagcaggtcatggtggagggtggggaggagcagttctatttccagcatgttgagtttaggggcctccagcacccagggaggggtccagcaggcagctgtctatacaaatgcagctcaggggagaattcaggactgggacacagattcagaagccagcagcagagacctgagaggtgggtgtgatcactcatttgctgtttaaaggcccagaaaggagacagagaagggatggacagagagggagaaggggaactgagcgagaaggtcaaggagtcagtaaggaaatggttagcaagggccaagtgaacagggagtcctccatgaaaagggccaacaaggctcccctggatgttgaggcagaaacgcatgagggactcaggggaagctgtttccatggagtcgggagggcaaagccagattagaccaggtgggggctgatgggaaggcaaataaagacaggaggcaaagacaacattctggagaaagtttggccctgaaggggaggagaggtgggtggcactggaaggctttgcttggtgtccccagacagctgactcatgagtgggatttggaaaaagcgtggactcctgcccatggcctgagtcctttaagatcagaaattatgtctcccatcatggcctctccatagaggcatgtatcttcagcaggcgttaggtcacaagccacatgatgccaagctgacagtggcttgcataatggggatatgtgactgtcgcataactagaattctggaagagtgcagtgccaggcttggggcagctttccagccatgtcattaagaatccagccttctcctggccttcagctatgccacgtggccagtgtctacacctgggatgtcaagagacaggctgcaggtccaccctcctggcctcatactatggaagaggctttccttttgggcatctctctttttggagggaggaaatagatcgttcccagaagcccccagcagacttccccttgttgctcattggttggaacaaggttacatgatacacaaagaccaatcactgcaaaggaaaaagggatgaccctgcctggcttacaccaatcacaatctattcccagacccccgaggctagggctttgcctcctggacacatctgttagcaagaggaagagattatggctgttaggaaggcctttgagaaagtatcccagtgcctggctgtgtctccaccaggctggaggccagcatcccaagggcaagaattctgtctccccattggtcagaaatatctggagcgcaggtgtttgtctccaactaggagcttctggaggacagggctgtgtcttctaccccagggttcccacaagaagccactgaatattaataaactcccatcttgtgtttattttcttatgatttcagcaaaacaggactcctgcagaagtcaactgtgtgagtgtgataaggctgctgccacctgttttgctagaaacaagacgacctacaataaaaagtaccagtactattccaataaacactgcagagggagcacccctcgttgctgagtcccctcttccctggaaaccttccacccagtgctgaatttccctctctcataccctccctccctaccctaaccaagttccttggccatgcagaaagcatccctcacccatcctagaggccaggcaggagcccttctatacccacccagaatgagacatccagcagatttccagccttctactgctctcctccacctcaactccgtgcttaaccaaagaagctgtactccggggggtctcttctgaataaagcaattagcaaatcatgt

SEQ ID NO: 710 - DNA, 32903 bp, Homo sapiens
gttgatggcaaacttcctcaaaggaggggcagagcctgcgcagggcaggagcagctggcccactggcggcccgcaacactccgtctcaccctctgggcccactgcatctagaggagggccgtctgtgaggccactacccctccagcaactgggaggtgggactgtcagaagctggcccagggtggtggtcagctgggtcagggacctacggcacctgctggaccacctcgccttctccatcgaagcagggaagtgggagcctcgagccctcgggtacgtccccccaagaatggaaagggctatggttccaggtacacatgattgacagaggggaaaatggaggtggggagggtgggaaataggagtgaaagagcctgagacagaatgatgaaaggaaagaaagaaggaaaccacataatcgaagagattcctgagatcagactcaggaaggcaaatagatttcatctgaggcaccaggcctgatcaatgaaattagactgtgataaaaaggattctggggctgggttcgggctcaggcaaaagcatgctatgattgattagctatgtctgccatgggcacaagaaggagctgtagggcatgccagctagggatttgataacccacactgcagggttttttccttaaccacaggggcccctcaacatttattctttcattcactcatctattgattcaaaaaaacacattccaatgatcaacagtgagccacacaaatatttgaaaaatgaataaaaaagaaaggaatgttgttctttggccccaaatctcatttttctcataaggtaatgatctgaaaagttatgacaaaggtgcatggacttgagagattttctagctatgtaatattgagctagtccctttcactaagactcagtttcctcatctgtaaaatgggagagagagtctgaatatcccccatcaatcgctgaagttctcattgtctacgcaactatgataatcatcactgaagtacataaaataacatgtatgatgtgctaagtgctctccatataataacacatttaatcttcctatcacctctacaaggaaagcaccatgattattcccactctgcagacggagagccaaggcagtgagagatttaataacttccccaggcaatctggctgcaaagcttttgctcctgcccactatgccacactgactctacactgcagtggattctgagtccatggctggaagtgggctgcctgggtacaagagtgtccttctagatgattcatccagtgagcattaattgggtcaggtaaaaaagacacaatgattaacaagatgaggtatcatacatggttctaaccagaaagggaaaacttgcacagatagtcattttcaaaacagtttgacatacaccatggagatagcctgggagtcagggcagacttctcccaagagaatgccgggtccttcaggagtgaagggcaggggaggaaaagattgggtcagtggagaatctctgagaagggggaacaggaggaaagaaagaggagggcagagcagctcaagcaggaaaggggtagtagctggtggtggaaggtgaagtcagtgaggttgttgcgcccaggtctgcacaggctagggaggagtttgccattgctcagcatctgcccaaatctgtgcatctgcctgtctgcccttgggcacctggaggtttaggggcttctgtcttatggccatggtgtgcacacctcttcctgagctcaactccatctttacacacagaccctgctgcttcccataggaatgttgaagcctccagaacccaggggcctaacttcctcattggcacttccctgcggtgggggatgctcgaagtcatcatttgccaacatttcctggtgctggggcagctgctcccccttggaggagacctacctgtctactactggcagtcctggtgagacttcaagtgggcagccgacaagcctgcctgggggactggcagcccccacccagcctgcagtcccagagggcaggtgccctggagcggagcagacatttcctacagttggtgccaatcccttgcttctggaggctcagaggtttgctcccccaagggtgtggcctggggagacaaagacatagaggttgtggggagagcaaccctgcctttggcatttgaatcccagttctgccctttttccaaccatgtgaccttaggcaagttgcctatcttattggcttgtctgaccctcccttatctcaaaagaatgaggacggtaataagttctttgggatttgacagtgtgcattttgaaaaagacaatgtgtgcaaagcatctaccatgatgcttgccacgtagtaggtgcacaatataggacagtgctgttgtccaagctgtgcaccttctatgcaccaggcagtctgcatggaactgggcattcagaaatgattagacactgtctcaggaagttcacagcctatcagataaattagtcacatcaatgattgagagtaaaaggagtcagggactgcactgtacaagagatgtgaacaagttctacgtaatcagtacaaacagcagtcccaaaactgggcaacgcatatggagggttgactgtgtctatagaatggtgccaagtactgtacatggattagctggtttaaatacaataactttgcatgggaggtcttatcatccccattttgcagtgaactactgaggcctaaggaggtgaggtaacctgcccaaggtggcaaggctatgaacggtagagagaagctttatggccaggcagtccagctccaggatccatgctgttggccaccacactcctctccctccgacatgcacacacatcgcagagggaatgatctaggcctgcacaggctgcagaagggggacctcacaaaggaggccacattccacaaagtatggaattcctctggcgaggacaggtgagggcagccctggtggagaaatccctgtgagcagaggcatggagctgggagctgggagctgggagtcacccagcagggccggggagaggctgggagccaggcacaaaaccaaggccttggacctttctgcaggtacaactggttctgtgttggaggaatgttctggtgaaaatgacaggagcagtgtggcttctggtatggaagccatcaggaaggaggctgttgctgaagacacagagaaaaagccaagagttggcccgattctttaggtcccatgaggactgaagtgttcaaacctcaggagggaaggggtagggtgggagtgtaatccgagtctttcttgcagatgtaactgtagtttgaaatgggaaaatcatgtatcaggtaggacttttctgggtgcaagtgacagaaaccagctcaaaccagcccaacaagtaaaggacaggtattgacatacacaacagaaaagtccagagataattctgacttcaagaaggcagatctgggggctcacatgacacccccggcactctgtgtccatctctgggagccttttctccatgttgttctatgctcagacagcctgtgttcatgtggtggcaaagatatacataacatctccagttcagagtcatctcaacttagccactccagcagaaaggcagctcctctctcctggaaagtccttcaaaagtggtaggaggagaccaggcatggtggcccaggcctgtaatcccagcacttcaggaggccaaggcaggtggatcacttgaggtcaggagtttgagaccagcctggccaacatgttgaaagcttgtctctactaaaaatacaataattagctgggcatgggggcggatgcctgtagtcccagctactggggaggctgaggcaggagaatcgcttgaactcgggaggcggaggttgcagtgagctgagatcgccactgcactccagcctgggcaacagagcaagattccatttcaaaaacaaacaaaaagtgctaggaaggctctggtcttcttggcttgggccaccagcccgtgtctgaccccatctctgcaacccagagatagatcatactcatctgctaagccaggaccacagagtcacccctggagccagagaagggagtaacccccaccaactgcctcggagggaggggttgattcccaaaggaaaattagggtggtcagcagaagaagggggaacagatgtccaccaccccaactccaactgcccctactttattacactactgttagcaaagtcacagatggcataccacataagtcattctacttatgtgactctggaccagccacttactctctctaaagctctttcctcactggtaaatgcagttaagaaaaagaatctgccaataagattgttgggaaaattaaatgaaaagacacagggcttaatattggcagaatactaataatacctattagaattattattgtgattgttattaagattattacttcttcagtgagatctcctgatcccgtgccttcctaggcaagacttatctcttaatggcttcccaagccaccatcgactttgttgtggaggccaccacgttggttaattaaagaggtcaagacccagctgtctcagacggaaatgaataaattacccactgggcgggaggtgaatctcttcatgcttcatgcttggcctgctgaagtgattccaataggccagcagcaggcctgcaggggccagggggtgaacccagatactccacccagccccaccctgatccagtttgtcctctctggggaaaacacacccagctctcagcaaagagaaattctggggcacaaactggcctctggggctaatggacctgcagatgtccagtatcctgagatttcccccatcccctcagacactggagggcagggaaggggctgaatgtctgtccagatggcttcctctctctccagctgctctgctgggacctggaggaacccattttccatgtggagcacaccctgttcttcagcctatttctgcctccttgagaagggggatggagggtgcgaggagcatctccaagggagagggcaagaaagcctgcttgattaacaactgttacttgcagagcacttcctctgtgccaggtgttgggttttgggtgcattcttgcctttaatcttcactaaattagagatcgtgatggccatgtgaaaggaagctgaggccgagagaggactgtgtccacgctcccatgacaggacctagatgggcaccaaagcccccactcttagccaccacgttatacagactcccaattcccaggccacacgaggcctctgcaaagtcgaagggtgcaaatatgactggagctgccacttactgagggtgacctgggtgccaggtactgagcgtggcaccttcagaggatgatctgtcaggtgaatgggaggaaagtctccctaaaacctatctgaggagaggagagaggtggctgacccctgccaagaaagcagagctcatggagccaccccccgaggagggtactggctggtgagagacatgggggtgggagaacagaatcttagaaactcactcttatcccatgggaggctcccttctccctcaccttggctgagccaaagacaggcaggctgaagctcagcaaaaggaacacccgaggctcgggtctacctagagctaaaagaggccacacccagggcacaggtgggcaaacaacagcccgcaggtcaaatgcagcggccacatgtttttataaataaagttttattggaacacagttacatgtattcatttatatattgtctgtggctgctttcctcctacaaaggcagagttgagtagttgtaacagaacatacggcctgccaagcccaaaatatttactatgtgatcctttacaacttgtgcttgagttgggcaaagtggttaagaatgtgtggtctcctgacacatatcgcctgggtttatttctgggatcttttctatctttgactcttgccagctatgtgacttgaccgccgtgcctcagtttcccttacttcttcattgagctgttgtaagattaaacaagttaaaataagtcagagtctcagggtagtatctggcatgtggcgtttgttgtcttattctgggaagtaccctaggaacttgaggagtaaaaaccctaaaaatcctgcacattttcgtgtcttcttgcatttcccgccatgcagctctgactggcccaataattctaccattggccagagctggagaaaaccattaacaccaataaataaaattaaaacagggcataatgggaataatgggcttctttccttccaaaataaatgtcactggaacaaattgttcaaaccactagtcttattgtttatggatttattcgctgtttatctccccgtctgtattggcgacatgatcaataattgcccataaatattgggcgtttataagaaggaccatttagaggatgaaagggggcctctggttactttgattccttcacacaggcctgggtcacaattgcgggtgttcaggatggcttttgggggtgatgggagactcatagcaaggggcaactgggtctaggcagggttgcacaccccctgcttcagggcaggacccatggcagtgccctgactcacgtgcatgcatgcctacatgtgtgcctgtgtgtctgttaatatgccagccacttccagtctctgagtgtctctgtttctttttcattctctttgtctctctacctcagtcttgtctctttcttttgaagtctgtctccctcagccctgtcactatctctgtagagtttccatctcccgcactcatgcacacagaattcaccccctgctatgaagccttgcccaagcagcattgctggtagagacaagtggagcagaaaggagcctgaagaggaagaactgatggaacccctctgcctctggtgaccacactctgtctgcagaatttcccgggataatgaggaaaagagctggacttggatttccagaagagactagttaggtcctagagtctgagcatgtcttctgggcagacttctacttcggagaaaaatgttagtaatgaggtgaaaaaaaaagaagtcatttagatggagggagcagctcctagctttttacctcccagtttcctttcccaaacggaaacccacttccttccttccaacaacatttactgcacacctactgtgtgcctcggtgctagcatccggccgcggacgaagaaagcctttgagagccactccctggaggggaagctggcctgaaaatcagggctgactgtgaaggctgacaaggtgctttcacggagagattcacagaatgccgggccaggagccaggatttaagcagggaaaatagtcacttctttctccaccagggtgcactgctccaccttctcagcctggagagacagcatctctttctctgtccatcttggctctgggacaggtcatggttgagattaaaggccctgtgtacagaaggccgcaggcaacaggaagtgctgacatcccggctcctgtagggcctttaagaaatgtcacagaccggcaggcagaaaggagctgtgatggcattttgggtctgcagaaagagcaaacatccgtataggaatcgtgccctggaggtgcactagcgagaggcagcagagtgaagggggcctgtcaacagggaagagatgagtggaccctgccaggacggcggaccccttccagacaggtggcctcactgcccaacatcccttccaggacaggtagatagcatcaccttcttttcacaaaggaagaaatcaaagcctggagagatgtgcggaaaaacacacaactagtaagtggcaaacccaggtctgtctgatccacaaattcgttctcttctcccagtatcacaggttttcgctgcctgatgcttttaagaccaagatcacatgcattgccccagctgctctgcccctgtatttgcatctgctggcaggacacgtctaccacaggagggatgcaccgtagtggttgaggatgggacctcagtagccccagacttatcacatctagcttagcatctccagggagaagagagcctctctctccccagtttcccatacatcaattgcagggaaaagtctggttggccttgcttgggtcacatgctcactcctgaaccaatcacagggaaattgcaaagctctgattggccagacccttatgacagggcgggtgccatgatggatgtgctcccatccaggaccacaggtaggtgttgaaccttgactcagagagtcagggaaggcttcccagaagtgatttctccaatgagacctgaaggattccagacaaaggagtattccagacaaagaaataggagaaccgtattcagacagagggactcgcaagtgcaaaggcccggggctgctccagaacttgtcttgctcacagccctatctcccccaatcttcccagggatgctcagggaatgctttggaaatgagctccacaactgactgtgtggccctagacaagtgacttgccctttctgaacttcaactttcttctctatctggtggtttaatcattctaaccttccaggacgatgcaagaattcaattcattcagtttccaaatattcatccagcacttcctcaatgccccgcatcctaggcctgccattgaaaagagaggcttggggcttacacacacggctgacctgcagtcagaaatgagaagggagctatggggaagggcagttcagaggaagaggtccaaggacagtgaggacagacaatgggaggaacggggtggcttgcagtgattcatgccttcaccaaccccaccttgtccccagacctgccccctccctttccactgccacttgcacatacaccacccctaagcggacttagccatgctaggctggctaggtaagcatccagggcaatagaacttttctcctcgttcctttgccgggcaactttgtaacctgaataacaggttgggacaatctccaacaggaaggagaaaacacactcttttgggtttgggtggctacagagggattcttgctccaccctgtgtacctgctccgagtgtctttccccctccccaccccagcaggccagtcctgggccccagctccagagcactcacgggctgccagggtgagcaggctagaaactcacgacaccaggtagctctgcaggtgctgggagggcaactcagcccagaggaagagcaggctggggagccctcaccgcccaatggggactgacccctggcccctgcccctctccaccccactgccctgaagccagatttcctgctcagcatggacaggacagcaagaggctaaccctctgcccaggtgtgtgtcccctaccctctgtctctgtccctatctctcttgtctgtctctgagtgtttctctttgaatctgtgtgtgcgcatattaaaagtacttgttgtgtctccctcttctcattctctctctctctctctctcttccccaccaccccgccccttctctccgtctcccccttcaactctgtcccagactggagtgtctctgtacacaccctctgtgaatattcatgtctgtctgtccatccaaccccatctctctgaccctgtccctgtccttccatcctgtccggccaccgactctcctggctcctctaacatggggttcctccgagtgtcttttgagtctcatccaagaacctaggttcctggactgtaggtcgcatccaaagcgtagtcgtgatcataatatattttttatctggaaaaaagaagctggtaatctgaatttcaggaagttaaagttccacaatttttctgtgggtagagccaggtgacagcttggttttctaatctggaaggccctagaggagtaggatcagggtggtgggaggactgttacaattcacaagaggaggtgtggttttgcagttgctgctgctgttgctgttattgttgcttaaacattaaggactggttcagcccgagcacctctcaatgtacatatggagggccaaggaggcgaatagacttgctcaaggttgaagagggtgttgggggctgtgccaggcatgagcccagtctcctgtctcaggtctgagcctttggcagttgaactttggagaccatgtctgttgagatggatttttaggataaagactctggggtgggcaggggacaggaagagttgtgggagaggtcatcacagtcagagaaggttacctgctgccttggagctggtgtgggaagtctgggaccaaagacctcctgtcctctaagtctccacagaccttctgggggtttcaaagctgcaaatcactggtaactgcccagcacctggggggtgacacagggggaggtgaagagaaagatgaccctgccctgctcagaactgaataagggagaaaactttggtttcaaccctcctctgagataaaaattcttggcagtgagaccgcagtaggacagatgaagaggggtttcagggagtgttcagcagccagaaacctgcatccaaattctggctctcacccttgcaagctgaataaccctgaacttagccatggtgggtcttgcttactcatccctaacatgggggttgtgaggattaaagagataatgcatagatggcacctggcacaaagtcacctgcaatacgtgagttgtgattactctttatcttggtacaataaacaaagatcgattgggcttctgctccctgatggtttcactgcagctagctagctcaacctccctggctggctggtaggaaggaaggaaggaagggaaggagggctaaatagacagctgaaaggatggatggacaggtagatagaggatagacagatggatggaaaagtgaacagatagaggatggatggatggaaggatggattaatcaactgatgggttgatgaatggatgggtgaagagatggatgaacaaatggatagatggataagtgaataaatcaaatctcccaaaagacagtggcttaccagactacaccttcctctactttctaatctctgcacttcaaaaaaacatggagaattgaatataaaactccaggggcaagagtgaaggagacatggaggcagacaggaaaggaggaaaattgccctcttgttcatatggcaggtggtgaggaacccaactgaaagaattatgatctccacagttagaggtccctttccctcatcttcaggcttgatcacttgcagacctgatgccagtttccgactggattttcttctctccataggtggaagctgaccccaagccacccttcacctggacaggatgagagtgtcaggtaggctctgaaattggttttggagtcatttttctgtcagctgtgtccacccatcctgggctcacagtgatttggctgtatctgttctcaaatggtcaggcccgaattccaggaggaaagcaatccaggggaggctggaagagtagaagaggcgacttcctgtctctaggctgaaaggcatgaggaacttttgcacagaggccccacatggctgggatcattgagactgcccatcttggaaacacttggcctggttggaaattagagacaaaaatatttacctcgaggagggctattctagaatttttataccataaaaattctagagggaggcaaaggccttctagtccacaccctcatactgtatccccctttgtacagatagggaaactgaggcagcagacacgaaatgcacctgcctcatttacattctagaacagctgtaaggagtcaggggcacagggttttgaagtcggcttacttctctgggtgtaaaccccacttttgacacttactagccaagtgacagtggggaagtgaccgcctctcagtttcctcatatgtaaaatgggaataatcaatgtatccagcacatagggttactcagagaatgaactgagataatgtattcaaaagttgctcacatggtgcctggcacaaaattgagtgctgggtgaacatgagctgatacccaagaggaattctgggtgcctagatccgtgctgtgccattgaagaccagggatccccacagacctgcatcccaccccacaggacccggcgggccttctccccagcctgagtagtcagagactagttcaaggctctagagctgaattcggggctggggagcaggggagatgccaacagggaggtcagagggaggggtgccacagctgggcctgtgcctcaagagtcagagcagaatgggtgggtctgattcagaaggtagcagggatgtgaaatggagcctgctttccggtccctgtaaagaaagggaactccaggtggctcgtccccatgtgtggggttgttccccaatcacatggggaatcagaaagcaatctggccatgaggcaggggccagggagctgtggcttgtctggaagctgcacagcaagtccagtgtgcggttatttgtggaggccttgagggagaattgatggaaactgtggggggcagccccaaccccaagccacctggaggctgcctacttttgacaactacaatatccctgccaacaagctcaggggcaagggtgttaccaggtctgctctgtgcctgaaggacttcagctcagagaggctgagctcctactcagagtcacacagcactgctggctgccctgagcactggccacagccttcctgactccctttccagggctcccctcccagagtcctgccctcccactgcagttctcaggcctccccttaaggggctacagaaaggtctagaatgctggcctcattgctagagattctctccctctggagggctaagtggagcccaggcaggcacatttttaactttctctcccaggggacccacttggggcaatgttgccacatgacctggcatcacaatctcactaactggccactggacaaattcacacatcttaccacatggtcccatggtctggtccccagcatggatgtggtctgagcctatagcatggggtctgtgggatttgggaagaactcacacgtggtcttgcaatgtggtcttggctctgtggtctcctggcagcatccccttgctcagcaggtgtgcttcgcctcctggccctcatctttgccatagtcacgacatggatgtttattcgaagctacatgagcttcagcatgaaaaccatccgtctgccacgctggctgggtgagtggggctcactgctgggggcaggaactgcagaccaggcctgggggccgaagacatattcttccctccatccctaggtgacccaggagacatgacaagctgtgctgcctttgggaccccagcaattgcagggagagggggcacccccagactaccaggaagggtggagtccatggggaacagaggtgcattgcaagggcctgggcaacacatgtgcccacatcgaggaccactttgaaaaggtgacccgaagaaggaaggaaagaaaggaggaaggacagagggaggaagaacagaaggaagggaggtgggaggaaaggaagaaagaaaatcatatattgagcgtcttcacctgcacctgctgctccctcttcctgtatctcttcatgcagatcccccccacctgccctcccacctggctccttctcagccttcgagtttcagctaaggttgccctgctaagattgcaccccttcctcctagtttagcttctctcatgtcaggcttttcctttcagaacaccatcattatctgtcattatggtttttatgtttcattgtttgttgccagtctccacaccctagaatgtgagcttcctgaagacaaggattttattttgtgtgcatccacctctctagtgcctggcacagagcagatgcctagtaaacatttgatgagtgaaaaaaaaaaaacggatggatggatggataaatgggtgggtggatggatgggtagttggaaggatgagtagatggatggatgggtagatggagagatggatggatggatggatggatggatggatggacagatggatggacagatggatggatgagtgaagaatggctgagtgggtgggtggatagataaatggatggttggatgggtagatggagggatgagtagatggacagatgaatgggcaaatggagagatgggcgaatgaatgagtgggtggagaatggatgagtgagtgggtgaatgtgtgaatggctggatggatagatggagggataagtagatggatgggttggtggagaacagatgagtgggtagatggatgggtggatgggtagatgggtagatggagggaagggtggatggatggatgagtgggtggagaagggatgagtgagtagatggatgggtggatgggtagatgggtagatggagggaagggtggatggatggatgagtgggtggagaagggatgagtgagtagatggatgggtggatggctagatgggtagatggtgggtgggtgggtggatagatgaatgaatgaatgaatgaatggatggacaggtggaaggatgctggatgctagctgctttacatgcatagtctcatttaacctgcacaaatgttccacagagtgatctatggtgtggttgtggaatggactcaagcacaatccttgatgtggtttcacatgtgttctgagaaaacagaagcttgaggagatttaaaaactcacccaagttcctcttggagatattagaacaagaacgggaacccaggtctcccagattcatatcctttctgatcaaaggaagaagtgaagggaagggatttatatctctggattcatcccgcttgaagaccaagaaccatgtacattgacatcatcacaaacatcagtgacctgagcctctcccagcttcctaaggcagcaagtaaaccagtcactccttcttgaacatgaccccacagtggagtgtctgcgatcccttaccttgtttgcttcttgtcaagcatgttccacagcccatgctgagatgatttagaagtttatatagatgcttagtggccaagtgtccccacccccgcgccccccacccccacccaggatcgctgcttttacaaactagacagtgatgtggctgcactaatggcctcaaaggtgaggggcccaagtcagtgtaggaggctcaggggtgtcctctagagaagagtgccccagtccgaggtgggagaggggcagtaattgaaaagagacccagtaattatttctctctcagtactcaactacctggggtttgacaagccaacatctccaaccaaccatcattaagtgactgctgggttttgaactctgtgtttggccccagggaccctcaatgaggaacatgtggccctgctcatggtctgagtcagagaaagaaacagacttcattacagcatgtggaaaaatgaaagtgcattaacatgatgcagagtctcaggaaatgtttacaatggcaggaaatgtaaccagtgggaaagatggccagtaaaaaccattgatgtttcagcactgaagggagtaattttcatttacttcagaggttcctaacctgagtgcacataccctcattttattatttaatgcactgatatagaagcacatatattactatagcacaaatttggtttttgtttttactattatattgatatataattggtttccaatctattttactttatgcatttaataacacagtctgttggagtataaagtgataagtgtctcaagggaagtgagaataattttattctgagaggagttcatgggcttttccaaaccaccaaagggaatcatggcacagaaaccagattaagaacccctgtgcctagaaagttaatcagagttctttcggataagagtgaccagccgggcacggtggctcacgcctgtaatcccagcactttgggatgccgaggcgggcagatcacgaggtcaggagatggagaccatcctggctaacacggtgaaaccccatctctactaaaagtacaaaaaattagccgggcgtggtggcgggcgcctgtagtcccagctacttgggaggttgaggcaggagaatggcgtgaacccgggaggcggagcttgcagtgagccgagatcgcgccactgcactccagcctgggcgacggagcgagactctgtctcaaaaaaataaaaataaaaaataaaaagatgagagtgaccaactcaactttaactggtttcaacaaaacatgaggtcttgatcgtccactatgggcatcttgtggcttcaggtgtggctgaatccaggagtctcccatgaagtccccagagctggtctctcttctttctacatccctgggctttgcttgttgctacttgacctcaacagattagggcctcattccatgggcagctttctctctaaggcaggcacgatggctcctctcccgatgcttatcttctcccttggctgaaaaagcactttctctctctctctctgtctctccctctccccctgcccccaccaactatgtatcaacatagggaagtagggaagggctctgtctccagagaaatgtaatagtatgattgacccagcttgggtctcatgccactcctggggccttggaggcaaggggtagggacatttccagatggacagcccctgagaaccaaatggaaagcgtgtaagtgttggggggggttcccccaaaaaaggagagtttcttcccctaggatttctgcttcctctggaggccctgtcctccaggcgtcactgctggcgtggtgggagatacgatgtagaaccacagaaacaactaggatatggtataagatttcaggaagtggccaagggccctagagccagtgcagacaatatgcactgtgggcagtcaggaaagagacaccccaatatgggccaaacacccacagcagcacaactctacccttcactggggcccaggggccaggcaccgggcttggccctcacacagtgatctcactgggtcccctccatggccctgtgagggtggctgtcatcacacatgccatctacatgtgctgtcaaggaaactgaggcccagggaggttaaatgtctcatgcagtcatatactaggaactagggcacaaactctaatggtctcaaacagcccagcttcttttgaaccaagggagagtcgtgtgtgtgtcttgtacaagtgtatgtgtgtatatgcacacacatgtgtatgtctgcgtgtgtgtacacgtctgtgtgtgcacacatgtgtgtctgtatatgtgaccatacctgtgtgtctctatgcatacatgagtgtcacatatatctgcatgtgtgtgtgtgtgcatgtgtatatgtgtgtgcgtgtgtgtacacatgtgtatctgtgtatatgtgtgctgtgtgtgtatgtatgtgtgtgaaggggtgacagtggcaaggcatttttagttcatttcaatggcgccaatttaaatccccttattcccactccccagcccccagcccccaacctccatcctgcaggagggtccgaagtgcttttcctctaaccagattctgtcttctctccagcagcctcgcccaccaaggagatccgtgagtatctgtgcagccccacacctcccccgacctcatccactcaccccctgctcccatttgccctagggcaacaaggcccagggcccctgctctgagccctgcaggtgccagagaaacctgggcttcctgattcttcccagtcctctcctcccatggcccaatggtgccttctgaagcctctaagccctgtggcaggggtggcccccctctcagtcattcagactgtagagacacagttcaactctgccccttctccagtacccctgctgcagtctggaccgaaccctgcccctgccccctgtctctgacaaccccacacagctgggagcccgaggaccagggctgtgctccttaaccccattgcagtgaccccaggcttggctcagggttcctgctgcaaagtgccagagaccacatcaggcactacaggggccccagagacaaacagaagtgggtgctgattgtctgttggggtggaaatgccagacctgcctaagagaagtggagaaagtgctctgggttccaggaggggcaccccctgcaaggcctcagggaggaggtatcccctctgcaaaggcctaaaggcaagaatgctccagtggagtccttggctagagagtcaggacaaggaaggggagggagagctgtgatgatggtactagtaacgatgattgagtgtctattatgtgccaggcactggattcagaacttcacaggcatctcatgcaatcctacatacaaccctatgttggtgctataagtagccccttttataggtaaggaaactaaggcaccgagaagtgaaatcttttggccagggtcacacagctgtaagtggtgaggcagaagtcaaaccccctccaccatctagtccagagcccaccccctcaacccctctttgcaagaggcagcacctccaggccctctccatttccttctcaacatggtggtgactctgaagagggctgtggctcccaaaataggattttgcctggctaagaaggacatgggtgccccagtacactgtgagattacagaaggcaaagacaatatgaagcaacacaaatcattcacctccacacccttaaccctagctccctgaagtctcctcagtcatattctgaagtggacacagagtgtcacagcatcttgttgctatcaaacacttagacatcacctgctggggggatagcaaattcaagcacacatgctgttttccaccctgcctgttcccatggcagacatcaccaatcaatcccagcattctttccctccaagcccataggcagccttgagagatttatcattaagcctttaacaggaggtccacattgacatttaagaggaaacctgtttgacaaccctgatctaaaccaacttcctgatttcacagctggcaaagataaagggagcaatttctggcaagccacagagcagattaatgaaagagcagcctatttcctgaatgaatccctgccccagtgctcttggtagcacaccagttccatgctctgagcaacagcacaagggttcccgggggggttgggcctcagggattgaggcagctgatgggagcagccttctatgccagaacccagagagcaaatctcctgcctcccagaggctgaggcccccttggcctcatctcccttcatccagcagcgtgactgtgaaggctggatggtcagaaaatcaatgctggaaaagcctgcttaagccagcctgttgacatcaggtttatcagacttagctgcaattgattaggctctgggcaaacaccagaagtggtccccagggctgggaatgatctccctgcataggtgagatccccgggtgaggggtgcatgtggctggaggtggggccccaaggctgtaggagaccaggagccatgccctggcttccctccccagcatcactcctcagccaatcccataggtgggggctgggccccttcatagggatcctgcccagaaggaggagaaggggagttggtccacccccagcccggccctctctcccctaagccacaggcttggatacccactctctcctgaacagcccttcacggatgcctctgcccactgcccactctctgggtgacaatgtcatggtttgagttcagttccacccatcacatgtgtgtgctgaaaccaggagagggggagccctggacaggcatttcctctcagattcccagggttgcctgctcagtggagggaaaccaagccagcagggttccctggtgtgggctgcatttgctcctagaaggggcacctttacctactcaaaggtgctcaccaagcctggcaccagtgggttgtgcccctccagaggggtgcattttcctgattcacctaaaagctccctatagaccagggagggccctggaaacctcatggtccctaccagcctcaggtgtagcctggcccaaatattgtacatgttatgcagtgaagactacccactgcctactatgtgccagacacaggagttttcaggatgagtcaataagataataaacacaaagtcctggccccagtgccttgcatgcagcaaggtcttggcatgtgcaagcttccttaaggagcctgcagctttgctccaaagcacacactggcagaccttggccagatgcctggcacaggggctggggagggaaaggctgcccaacccccgttttccctttgcagatgagcattctccaaatccatgtttacccagtcctccttaatgctgccttccaaactgtcagcgggtgctaaaaagcacacattaggatgaattagaacatgccaggctgcaagggcgggtgtcatcccagaactcacagagcacgttgagggctcagccgctcagccacatctttaggtcccaccagcatctccccccaggcatggacctccccaatttaccctgtgaaggctgcatggagaagatgcaggtcttaggaacagccagcatcaccagaggtgccacttagtgagtacccagtgggctcccaacaccgtgctgagctcccagtgggagaaccggaaccgtctgcctgttctctgttgtattccagcatcaggcacttagtagatgctcagtaaatgagtgataaatgaatgaatgatgagaagaatagccaatgtgtactgagcattaaaccacactcatgtattcctcacaagaacccagtgggggaggcaccacagataccccattttgcagataagatgaggtgcaaggaggttgagaatttgcccaagggaacctggctagacagaagtgctcccactcaccccgccagggtccctgggagttctcaacaggggcctctggggactcagaaggctgccatggcccaaacgagaggttctcaggagagtcccttcgtcatagtgactcaggtttactctggttacatttaccaagggtgccctgctgtggctggagctgtgaagggaagcccaaaaattcattctgggctggtcctgtgtgctctggtgggggctgttggaggcactgtggagcccagaagggcacatctcccagactttgcaatcagcgaaggctcccccagaaagaggctctgagcttcatcccaagctgcgccctggccctagccctggccctcccctccttctcccccaagtacctcctgagcttctgcccaccaaggctggtctctttcctccccagaggttaaaaagtacaagtgtggcctcatcaagccctgcccagccaactactttgcgtttaaaatctgcagtggggccgccaacgtcgtgggccctactatgtgctttgaagaccgcatgtaagtacctaagacacaactatgtttattttattttattttattttatttcattcattcattaaaaaactcagaggctgcaggggctggcctgtgagaccagcccacagcttccctttcactctgggtgtgtgaggcacaaataacaataattgaaacagctcccacatccaccagcaccttgcctggtgcttcacagcatctctcattcattcccccgacatcctgggaggtggggatattatccccaggagaatgtaaagatgaggatagtggggtgcagacagggtcacctgcccagtggcaggaccaggatttgacctcaagtctaacagccaagttgctgggcttcccatgaaaggaaatgcctgcagagaagtttcaagatcctgacccaggcatcaaagcccagatatagcaggcaccagggcttccaccccagtacaggagaaaggctgtgtacctatcatccaacctagacagtaaaggccctgggacagcaagtgcaacctatgaaagaactcagggacgggtgtttaaaccaggattctgaacctaaccacagtttgtttaagcaaaacaaggaagtgatgggttcaaatacctaaaagaccaggggtggtaggcaggcttcaggaccacctggatccagggattcaaacaatgtcatcagggctgtctatcaccccatcttcagctctaccctcctctgtctaatagctttgcttttttttttctacttgcaagggatttctccatgtggttaaagagggagaccaccagctggtttgacatattagcccagcctagcaccctaatgggaaaagagccttcctgtctaaattatccctgcaaaagtcccaagcctgtatttcattgattggcctgggtcacatgaccaagcctagcccagcgtattagtccgttttcacgctgctgataaagacatacccgagactaggtaatttatccaggaaaaagattttaatggactcacagttccatgtggcaggagaagcctcataatcatggtggaaggcaaaggaggagcaagtcacatcttacatggttggcagcaggcagagaaagagcttgtgcagcctccttataaaaccattagatcttgtgagatttactcactatcatgagaacagcacaggaaagacctgcccccatgattcaattacctcccactgggtccctcccacaacacgtgggaattcaagatgagctttgggtggggacacagccaaaccatatcagccagtcgctgtagctggggacgtaggatgctctgcttgtccacacctgggagagagaggtcaatcccaggaaccacctggcctgttcgtggagaaagacaattctcccaccgcacatccagagacaagggtgtggatgccgggccagcaggaacacagctgggccacatggggactcagacaccccaggatggcagcaaccttctgggtcctgcctccttccagcagccaggcctcacggcctgggggtgggctggccccacctccaacacctcagaggcccaggcagggaccttgcctcttctctgagcaggttgttctggtccaacatgccttgagaaactcttcagagaatccagcccaccactagttttcaggagaaaacagatggccccagttattgcatgtgtttcccaatgcttctgcattgcttatgtgggtcctcacggagttccccagctgggagagcagagtgttcattccacactcgggaccgactgtcatatttcttcttcattgtcttcaggatcatgagtcctgtgaaaaacaatgtgggcagaggcctaaacatcgccctggtgaatggtgagttgcatatccatccccagacagttcccacccagaaccagggagggtagggggtagcggcatattcattcaaccaacattggctcagctcctacctcatggcaggaatgcccgtagagctcaggaggggaagcgtggctggcctgggggaacagaaggtctcaaagacccgcagagctgtagaaccgcagagctagccaggcccctgccacatgctcctatctcaggaggacacacttctcctatggaacatgagtgaaacatgacccgatcctcaaagcctctctgcttaagccaacacaaatgaggatgtggggacaaccaatgacagtgcaagatcacatgctgagtatacaccttcattcattcattcaacaaatacaggcagcagctactgtgggccaggctctgtacaggacactgggggtcagccaagaactagaaaggccctggcttcacagcctccgtaggtatccgtgaggctcacaaacaatctcaatgtggtgagcctctctggaggggcaggaagcacagctatgggagctgggatgcagagctgggatgcagaacaggggacagaccccgggtggttcaggggaggcttccagagggagctgatggccagctaaggcctgaaggattgtgggcgctggccaggagaaaattggggaaggctctttccaggcaggggcaacacagtgcagggaggagaagggaaagggagggagagaggtttgcagggcaacatagagaggcaaggctggggacagcagcaaggccagaggatgaggagctagcaagcctgctaagaagtgtgactggaagccgagagcagtagggagccacggaaaggctttgagcagtgtgtgaggggccaggcatgcactccagaaacctccctccagcttggagtaggggggctggaggcagggagaccacaagggaatccatggccttgataaccctgcatctcctgcaggacacacacttaaacaggaggccagagggccgccaagcctgaagtagggacacgtttcaggagggagtggacttacagggtcaggtaaggaccaggtggtctagccccagccagacctcctctctgcctctgttcttagaaaacagagttttctaagaactggctgtaagggccacttctgggacaaaggtcagggcaagttggggaaaaggtgtaagggatgctcaggaaggaacttgtcgagcttgtgtgtggcaggaccacatgagcacacttaggaaggaacagggtaggatgggagccccggccttgccagctccaagcccctgcacttcactccagagaaagccttttctcgctctgccaagaaaccctaatgggtcaggggagaagtcgaggcctggagcagtgatggggctgttcctggacagatgggagtcagaggacagccctggccaacttcctaggagcccaggaagggccagggcagggagtggcaggaggctgagtgcagccgttcctctgcagctttgaggagggcccaggcctgttccactccagcctcaatgaagtggcatccctcctgcagggagggtgtgcccaggctggtctcagagcgctcttttgtgcatgccagaccccagaagactgtaggagcctcagcatacatcaacactcccatccatctgccctcaccccacagcgagggcaggcaggaaatggcacaggctgcagctgacctggctgaaacctgctgactttctcccctaaatgggtcgcacctgagaaaagctttttgaatattctccaatgagatggccccagactaggcctctttccctgcttctcacaaagccaaaaggatgaaaataaccatcaatggcaataagaactagcatttattgggcacttactgtgccttttcatttaaccccatcactgtgttaggatggagctatgctcaatatccccatttcccaggtaagaaactaaggctcaaagaggttaagcaggctgggtgcagtggctcatgcctgtaatcccagcactttgagaggctgaggtgggcagatctcttgagctcaggagttcaagaacagcctgagtaacagtgaaccaccccccgaatccgccccgtctctacaaaaagtaaaaaaattagctgggtgtggtggcgcacacctgtagtcccagctaaggctgaggtgggaggattgcttgagcctgggaggtcgaggttgcagtcagccaagctcacaccactgcactccagcctggactgcagagagaccctgtccaaaaaaaaaaaagaggttaagcaacttgcccaaggtcacacagcctataaaaccacctacgtttgaacctggatcgagtcaactgcaggtcttaatcattcacctgaactacctccctagactagaaatgtctcaaccacacatacagcacctactgtatacatgcgtgctatgtatgccagatgtggggaagcccaacaaatcatgtaaggggctcagtgtcctcatctatatgaccaagaacaacacaaggattgctaaggatccagtagtctttaacctttagtggggcagagagtcctcaggatcttccagctatgctggccgccacccccacccccaacactctccaattgcagaatcattcacaagcgcacgcgatcacaaaagcagccccatgggttcatagactccttccaagagccccaggtgaagcattccgttcacgctacgtggctcccgagaatcctggaggggctgctaagcgagcctgctcgcgccacctggacagcctaggcctggtccccaccctcctccgtaagcctcggagctgccatcccctctgcaacgcctccatctagcggcggagagcgcgaactgtaacgttcctccagaagactcggttccctggagggcttggccttcggccacctcctcccacaaaacccacaaacgcaatccaggttactggaccctgggaaactgagtaccgcttagcccaacacaaatccctttgccttcaagaggtggaggactccagttgtaggttttctatttaggtgggaataataatgacgactgtcattttgattttgattttgcagctaaaattcatcttgtatgactactattaatattttaaatgtatctcctttagttcccacaacccattgtacagatgcaaaaattgaggtcaaaatgctaagtcctgcgttagaaactggtaggacagaacaccgactcagactgagtagactcagttcgattccagagatgtcctcagccattacgttcttgaacctctcagatgagcccagccattcctggaaacctactttagtcctgcgtgctctttataggacctgatttcattagattcttattctgtttttagatcttagactacagattaggcattttcagcagaacgacaggcagaatgacacgtgttacaggggataatcgttctcctcttaacccctaggaaccacgggagctgtgctgggacagaaggcatttgacatgtactctggaggtaggtgcctctgctgacactgaagtcacagtcgggggtgcggtgcagagggctgagcctcttcatgtggcaagggacctggtggctcgaggtacctggtgcttctttccacaggaggcacccaggaagaggtgcggtggggggttgagggtgtcctgctgctttcgaaactccttctggccatctcagttgggatctcccagactcagatcctgagacagggattcaagtgcaatgctttatttaagaagtgagctcaggaaacgtcagatgggcagctggaaccctgtcctcagcccagggcttcataagaccccacccggccctcctccatctccatcccaactcatgggtgagcagtccgcagagctaggagtgtgctgacctggagtctgcatcagggcccacgcaggtctcttaccaggtgtgccccacccccaggcttctgacactcccccaggatggaggggtgaccaggggctggctgttgcttgatgggagggtgctgtggatggagcctggatgggcccactgaagtgcccacatgcggtgtgcaaggtccctcctcctggtacaggatagagctgaggacaggggcaacaggagatggggacaggccaggggctgaggaccagacattctgcctggagtcctactgatgttcagcgtggcctggggccaggtttatggaaaacgtccagtctccggtgtcagagactactggcggcatgacctgaagcaagtgatgcctcttgagcctcagtttcttcatctgtgacatagaggcagctatagtttccactccataaaattgatgtgaagattagataacctgaaataattggtggaagggtatccagcctgactggtggaggggtccaggcaagctatgttagtcttctcccttccctcctcttccccttcgctcccctcttccctcattccgtccagatgactcagaagcaaggaaatcatctgtcagaatgaaaaggaaaaaaagcgtaaagatgaaactaagctttaaaatgccttatgataaacttgaatgtagccacggctgatggggacccagaaacagaagcattgtgagcaagtagtccttcccttcaggaaacaaaaggggatgatggctttttaaagtgaggtgatcattagcagaaggcatgttttattttttcaaatacccaccgtccatccagacaagcaccagaccgtaatatctgctaacaacacaaattaatggtgctttaagagctccctccttttgtcataaaagttcaagggccatttctttagaagagtgactgtggtggttgaccggaaacctctgtcactgagctggctggcagctggccttagttgggagaatggcttcttccccaaggtcctagaggtccgcactggaatactaataatcaaggccagctttgtgggcctatgacctggggacagggcagtcacacggggcccatgcttggaagaatctcacacttgacttcatgctctgccatcgtggtcttgaaatacttaatcattttttattaaaaggccctgcattttcattctgcactgggtcctgaaaattatgctgccaatcctgctaataatttttggttccattagagtacgcttactgtatgcccaaagttattgtcacatttgcacttcatagaggttataagcagggctgttactcatcctcatttgacagatatagtctctgctttagccactaggctgcttgttcccaaacttgagcccactcgagttgcaccatatctagaataatatctgcattattagtatttttctttaaattggatcactttttttcttacctaagtaaatatatcttaaaaggaaactatattactgccttaaatggaaagctattatcacttgttatgcagggaaggtgaccataaaaataatcacaatggagggccctgggacagtggcttatgcctgtaatcccagcactttgggaggtcgagacaggcagatcacctgaggttgggagttcgagaccagcctgaccaacatggagaaactccaattctactaaaaacacaaaattagccaggcatggcggcgcatgcctgtaattccagctacttggaaggctgaggcaggagaatcgcttgaacccaggaggtggaggttgcaatgagcgcagatcgcgccattgcactccagcctgggcaacgagagagaaactctgtgtcagaataataataataataataatcacaagggaaacaaatcagcctcttcacagtgagctggatgctgatgcctcccccaggtgctaaacctagagctgttctctgttaaatagagagcttggcaagttagggaggcattaaagacacacgcagagccttgctccttgacacagcaggagagttgtattcatagtctactcgaattctctcccagggatctcagttgtctgaggccacgtgctataccacctaaagtcagcacagataatctgggcattgtccagcgtagaatggggtctggggtatgcaaagggcccagagcacctgagagatgatggcacttcgtccccagaggggtaggcacacaagggcccttctaccagtggtggtcaccctcagctgcaaatccctgtcacgaggggaatttctaaattccagtgtccagaagccaccccacatcacctggatgagttcccctcactctggtcactctgccctcccctaggacaagggctacagggagctccacctgggatgctcttcctcctggcttctgagctcagcccagtgtccaccgggcctagctgactcctgcatcatggggcagtagacaagcatgagaatgaccagggctcatttcccctaaatcaccagcaccttttccttcctcccccagatgttatgcacctagtgaaattccttaaagaaattccggggggtgcactggtgctggtggcctcctacgacgatccagggaccaagtaagtagaaaactctacctgccaggccacacagtgatgcaaactgaataccttcaaaccctgcacacccttttctgctcttttgccagatccattttctggcaacttatctcgaggaaattatcagacaagtatgcaaagaaatgttctaggaggttcatcacagccttcattaccacagtgaaaaactggaaaccctctccctgtccaataataacagctgactggctacagaaactatgacatacggtgacataggatatgatatatacacaaatgaagatagactgcatcaaaaatgatggtgcggaaagtatttaaggacgtggaaaatcgctcaccctctagtgctaagtgaggggaaaaaaaaacactgtatggaaatacatacactgatcacactaaggggaggaggggtgagactgtatttcttagttacttctttgtgatcttccatattttccaaatgaatgtgtattgtatttgtaaatagagcagtactgttttaacacatctccagccccatctgaagcccttttagagaggaagtcttgaagccctttaccctgtccttcctgagtgcagccacgttctctggacacccccagggcagatgctgaatggggagaagagtgggaaccttgccccatgggaatcccaccacctgatgcccctgcgacccacccccgcatcctgaccatcctctctggtcctctgcagaatgaacgatgaaagcaggaaactcttctctgacttggggagttcctacgcaaaacaactgggcttccgggacagctgggtcttcataggagccaaagacctcaggggtaaaagcccctttgagcaggtgggttctgggccacaacccggccctatgaaggatgcatgaggagctgggtggtggtaggaaggagtcacccattcacctcccaggggccttaaaattgggaggattgtctggggagaggcccctggctgtcattcactccaaaggccagggtggtctgattggccaggaagctgccttggccatttcgcaaaagctgggtcatatatagatacgcaggtatacagataattatcagaaaaggaagagggaaaaggagaaaagaaggatgatgggcaagtgaggcatgaaggaacgagaaagaaatggagacatggagctgtgtggcggggaaggggatcccggggaaaggagcaggatgcctgtccccatcccttcagcctccctggcgaggcatggagaaaacgaggagggaagtcagaaggcagggaggaggccgatgccatcatcagacaagaggtgctggagggggcaggtgcagggaaccgtgtgctgagctctaggaagggcaccaggactgggatgggaggatttctttcctaagctagaaaatgtggtcttggtctgtatgcgtgtgtttctaagaggatgtatttgggtaactagaaattacttgaacgcagtgaagaacgcaggaggccggtgggcgggggcggccgggtgtggttcccgaatgtcctgtgggggtgctgcagcagggccctagcaagaggcaagaggtctgaggctgcatgggcaggtggtgctttcctgccccaaagcgtgggctccagacccaggggaaccggcaagacagaggaggcgtgggagtacaggaagcccagcatcatcttcatccatctgcaaccagctggccgggaccgacacacaaaaatgaaccaagcaccctaatgggactaagccggtctgttcttagtcctcacacttgggaaactgggttttaggcaggtagcatctagaatctcttttttaattcctgagagtcagccacaatgattccaacagcagattttgccatttacgtttttttctttcataatccaaacctgagcattttagacacaatcctaagtgattttattcttcttacatacttattactagtatatatatattttagagatagggtctcgctctgtcacctaggctggagtgcagtggcacaatctcggctcactgcagcctcgacctcctgggctcaagcgatcctcccgcctctgcctcctgagtagctgggaccacaggcatgtgccaccacatccagctaatttttttatgttttctagagacagggtctcccatgttgcccaggctggtcttgaactcctggcctcaagtgaccctccttccttaccctcccaaagtgctgggatgataggtgtgagccactgcaccccaccccttattattagtattaattaatattatgtggtggttctgccacttaccagccagtgactacgggcagtgaccctctgtgcctcagcttccccatctgtagaatgggatgtaaacagtgcacactccctagggccactgtgcagattaaatacataaggccctgcagaacaccacgtggcatacagcaagcgctcaagacatggtcggagtcttctttttattgttgctatcattattgttatttgaggtatcctagagggacacagagaatttgtggggaggggccagatctctccaacaactggttacccttcagggcgtgagagcagttaactgggctctgatcccatctctgagatcttgagcaagttgcatcccctctctgagcctcagtttccccatctgtgaagtgggttaataacatcccacacccccatttaggtttagagcacagtgtccatgtgggcatgagttctgaacagcctcactcactgcctatatttctctgtcttctctctctctagttcttaaagaacagcccagacacaaacaaatacgagggatggccagagctgctggagatggagggctgcatgcccccgaagccattttagggtggctgtggctcttcctcagccaggggcctgaagaagctcctgcctgacttaggagtcagagcccggcaggggctgaggaggaggagcagggggtgctgcgtggaaggtgctgcaggtccttgcacgctgtgtcgcgcctctcctcctcggaaacagaaccctcccacagcacatcctacccggaagaccagcctcagagggtccttctggaaccagctgtctgtggagagaatggggtgctttcgtcagggactgctgacggctggtcctgaggaaggacaaactgcccagacttgagcccaattaaattttatttttgctggttttgaa

SEQ ID NO: 711 - DNA, 80270 bp, Homo sapiens
gcggccgcggcccctttaaggagcagctctgcggtaacccgagcccgcagtccgggcgggcgcgacggccgccgcggtagctggagcctccgcgactgcacctccaagcggcccggaacccgcggcttccctggctcccgtgagcatctcaccgggcggcactggccagcgccagccctcgggccggcccggatgagcagactcctgtagacacccgccgccctctcccggctcggcgcagccgccgcccgcgcgcgactcgccccgggacccggcacaggtgacgccgtttggagggggggttggggaggaaggcgggcttgcctcgccccgcggctcccccgcgccagccgccaagcgcagcccgcggagaggggtgccgcggcttcccgcccctggcctagcgcggccgagagctcctgcgcctggaggctgggtgggcgtccggcgcgcgggaggcggcccggggctcccgggcgggctccggcaggtgtgtgcggaaggctcagcatcgtccccgcccggcgggccacggcgtcgctccgggagcaaatggtgtcccggggcccgcggcccccgcgccgcccgggcgccccgcattcctctcgcgtttctcgggctgcacgattccggctgccctgtctgcctggcggtgcctctcgggtctgagcttaaagcgggtgggtgcaaacctttgggcatccagggagagctttcttgttagagcccacacacaatcgggcgcatcaagtgggtaagtccccctcccccgccgccaccttctgaaacaagtagctcttatttacccttgcagttctcaagtgggtcccatttttagccactgagtgctgaaaagtctagtgggaagggaccaggcgtagagtcggagggagaaattggtttctatttccatctttacctctgtaacccctaagtgcctcggtttacccagccatgaaatgggattcgtaatgccagcagtttcctacccctccaagacggcagaaaaacctctgtgaaaacactttgagtctaaattcatttaagagtcgctgttgctggtctgtatatttttaattgtacacacatttgagtgttaatgtggtgcacacttttatatgaaattatgaaatttactttaaagactgatcttggataatgtttaatccaaataccagtttggagaagatggaagagtttgtgtggaccctaggaattgatgtgtgaaataggaaaaaagatttaataaaatctttacgcagtcataaatggagttgagaaaaattgaccttggattgtggtgttttaagtgagttactcccgtgccagcgcatggtgtcgattgaaatgtagcttcatctttgtgtagccgattaaggtaataagttagagaatcccagctcccttttaattgtgctatatatgaggaatttttatccttgcttatcttttccttaaattgggcgaaacgaaattagaaaagtgtattcccgccgtgttagaaaatatgaaagaatgggtgaagaaccatggattttagtttatttgccacgcccctcctgtgccatctgataacccagagaatattttgagggtgcttctttttttttctacgcctgcaactccttttgtcccattacctccctctggagtttgaatctttactgtcctcatccttgagatgaattttatctgtttaggctggatgcctctgacccagctgcccaatcagtcattatttatttacagtattagatttccatttatattcatttcactctaagccttctttaccctggtggaaagaataatgggtctttgctactaatgctttatacttggaggtgaactaggaatggcatgctcaaggtgctgagactaatgcaaaccccagggaagctaggtcttcactggagtcttctgaataggtcctggagtacagatgcaagagttggcctgtcttttccttgattttctgaaatctccactgggtaaattcatctgattgccaagggaagtcttatgagcagggagctatcagaaatctgagtgttagactgattaagagccttccctgcaaaagactggggagaaagaagtagtggctttgtaggtgttggagagtcctccctgtaaccagataactagtaggaagtaaaggatccctagattcccaattgagaaatgggaaaggggctgggtttcaaaagggaagtggcacagcttctaggcaggtttgggaatgtacctgaggtttgatgggcccttctccctctttctctttgagagtgtttctggctcctcagagtcaagcacagctgtcttaacagttttcagacctgtttactctcctctttggtgctctaaaggaggcccagcgttcatgttcctctctcaaagctggtcttgcatgtattagaggaaaatgggcagtttagtttgtaagaaactctttagacctcagtgtctctccccacccttctttccaaattagtcccacatcctacagattaaggatttgtttgggcttcaatatctcaaactgggatactcagtttggctgagaagagtaaactgaacagtctacactaagatatgaaaagctagcttttctgttaaggaagataatgaattaattgtctgggtgagaattatgggcatttggacaaaggagggccagactgggggtggagttgtgctggacaacttgtgccctcgtccttgagagaggaaaggataccaccaaactagtgcagtcaccctgttgtgctttttcttcttccatttgccttgagagaagaagaagatagcagtatggaggtggagtcaccatctgttctcaaggatgggaaacagactttaactgaacattaggaatgagctgtattcacctggcattggtatcaggcgctggatggattacaccagagaatacattacattaggaaagtaaggctaattttgtaagaaagtctaggtatttccagagtgactttagtggtattttttcttgttgaggatgaaaggttgcacacaaagaaatggaggcctactgctctgaggcttgttattcctggtgagacagttggatgtgctgcaagcagatcccagacctgatcaggcaggataaggcaggaatagcaaaaggtgtttctttgttcagaacattggtctgttcacggagaaggcaatggatatataagaaggagcttctgaactggtgtaaaaggccaaagcttttgaaaacagccaacgaagaagacacgtggaaggctgttcagagcttgagccagcactggaggaagggagtcccagacagcgggaccaatatcatgggtggagtttgagtaggtggacaaacgcttgtctaaagcagtgtttcaaacattttcagactacaacagtacaaaatgcatttttacactgagacccagggcatagcaagtatatgtgtatgtgaaactagtttctatttctattgaatttctgtttctagtctgtgttcttaaaaactcataacgtgttagtggatcacagtccactatttggaaaccacttttccaatgggtagaaaaacaggttgcagtggagcaggctgggcggagggggattggagatactggaggaggtgtggggagcatagaattgattgagcactacctggacccctgtcggtgggagagaaggcagtgtagagactcatcttgtgtctgacaggtgcagaactcacatagatgaaatgatgggacagatgcagaagaggggactttccaccagttctacttacttcaaagcaaaatgattggctttaaggaaaaggaaacgtgcaaggagtgaacttggatatgtaagcacatttctttagagcagtaagattttcgtctgtacgcttaatgaggagacaaaaggacccagaacaaattggctgatgaattcaggtcatgtccactttcatggccggatagggagcagaggggctagtagtgcagggagggtgagtaggaggctcacacctcccctcacaattttgagaagttggagcagaagcagcggatggaatgtgttttgaaaccccatttgctgatcaaactcattaggaagttggctgcttgcctcacagagaatttgaaaagtattctttttttctttttgagacagggtctcgctttgtcacccaggctggcgtgtagtggcacagtcttggctcactgcaacttccgcctcccggcttcaagtgattctcctgcctcagcctcccaggtagctgggattacaggcacccgccaccaccccgggctaatttttgtatttttggtagagacggggtttcaccgtgttggccaggctggtctcaactcctggcctcaagtgatccgcccaactcagcctcccaaagtgttgggattacaggcgtgagcctccgtgctcagcctgaaaagtattcttattacattttataaaagggctagcctgtcaggacttccttagaagtatagatctgtgatcaaattccaatcatcatttgtagcctttgggggtcatctaaacagcttcttggagaaactgatgaggcaaccagcaattgtgagttaattccagtatttgccctggagttaatcaagggcagagtcttaatctgtagttaatctgtaggcttttgatttccttttcatgactatcaacatctggttacaacaccgaacactcctagcagcaagaaaagcctggaggaaaagtacacaggtggctggcgtggtggctcacgcctataatcccagcgtggaggtgggcagatcacctaagtgaagagtttgcgaccagcctggcccacccacatggtgaaatgccgtctctattgaaaaaaatacaaaaattagccacacatggtggcatgtgcctgtagtcccagctattcgggaggctgaggccagagaatcgcttgaacctgggggcagaggttgtagtgagccgagattgtgtcactgcactccagcctgggcaatagagtgggactctgtctaaaacaaaacaaacaaaacaaaacaaaagtacacgggtatcagagttcaccccagcacgttgcttagtgactgcttgcttttatcattgatattccgacctagttgcagcctccccttgacctgaccctgccttatcagattttcttaccttagttgatgttttcagtgtttgacttcacccttcctcagctgtctggtatttatctaatgctttcaactctggtttctctgttatctctgacaactctccccctatcccccaccaactgccttgtggtgtccacctgactccatggagctcaattctgggtcctggcttgtgacatgttactattcattgaattctgccatggcaaactctaggaaaaactgcacattgatgagtttatgcatttattaatttaactttaaaattttggggacctggagaaactttcttggtcaaattaattttaattagttttctccaaataggctgaaaaaatctttgaaaaattaaacttctctctatatctgtatttagtggaatgggaggaagaaggaattttcatttgatgaaaaagtttgaaaaatttacaagttctttttataaagtgttactttatggacatgatttttttttttttaaaaagagaaatagggtctcactgtgttgccccaggctggtcttgaactcctgggctcaagtgagtctcctgccttggtatcccaaagtgctgggattacaggcctgagccactgcgcctaacccgggacatgattcttaaaactagtcttgctcaattaacatgttttgctccattacatgtaaaaatattgagacaggaatttaattaaatgctttgtaatttgttacatgtaaggacttataaagactacagctttgtttagaatgaggtttccttcccttttcatattttttaaacctgtgtgagtgctcccaaacagatcaatttcttacatgccctatggaaaagtggaggaatccagggcaacataaggatgaaagggtgaggccaagaggaaggcttgatcacctggagccagaagaaagaaccaaacctttaagacatatttagcattttgaagatttgagaacactttatagtcacaggcctctaaatgtttagtgtttttttaaattgcaaaagtaaaactagctcattacaaaaaaattataaatgatcaatatttaagagaatgaaaattcacctctgcttcctcttccagctcccaccctggctagtttcactcctaaacacacctagttatcagttttgggggtaaggccctccagacgttttctctacaaatggcaaaatgtgcccagagttatttagttttgaaaaatttattattttgcagcttgcttcttttatcacctttttcatttaaatgtcaataacatgtgatagtatacatataaccatatttctattggtggaccttgaagttacttctaataatgttttgataaacactcttataaatactgtatatcttttcaaacttgtgtgaatttttgagggtaaaagaccaattcattggcatactgcttattttataattcgggtaacacagtgttatcaacatttacatattctgctatttaattccccaaatattcactcagcagtgaaagcgcagcgttagatgttatggggatttcaaggtggggcaatgcatcctccttacctacaagaggtcactctctgatagggggattaggcatgcacattgactatagtatctttagttttatttatattcccctttgtttcaaacaggatttgggattttttacaaagatgcatatgatatgacaagataaagtatatttagtataaagaaggaaaagaagatggaagtataagtgaggctggttagtgtatttcgaagtcctgttctttccttactaaaagttctggctataagctttccagcagcaaagagaagaggcaaatgatctataacaagcttcagggtgtccagaagagaaaccaaatcagagaagcacacctattcctgattccagaaggcgagaaaaattttctcctttgggttttcattaagaaaacactatatttgcaatggccacatcctgaacaaccttcccagtatcttacagtaaaacctagtgactttgccttacgatgccatctcatatcatgttgcccagtgctagccaggggtatcatgccatggcactgctcagtgaaaggtcagtagggtgaggtgtaggttcatgggtttaatccagaaatagctttaagaggacctaaagggacacatgagcaatgaaaaatagcaatgtgatcttgtttctggataatttttccacaaagtagtatagaatatacaatttcagtggaattgctatgagtaaaacctacagaatactaagcctgtaacttttgaaatcagaaatgaggaagttttagatggcattaacttaatagaactatagcactggctgggcaaaatatttttctaaaaaaaaaacaaaacaacaaacaccaccaccctgtacttggtccacacaacaaggatggtacttaatcaatcccgtaagttagaaaggattagagccaccattctaagaagtcttgatagcatcttcaagattaaacttgttaataggttatacagtgtgagaatgtcatcagggcttagaggtctaccaggtgggtcagcttgaccctgtttcataaagccaggaagaattcacttcccatgagttatctggatctgaacttccatgaccacattcaccaaattcttgccttgggaatgttggcctaaaacagttcttcattatcaagtctgtgggccaagcttaggttttttttatgtgacttactacacctgaatttaaacatgaggttgaggctacctgaagtttgtgatgtgatgaaggcacatctgattcgttttgcacatcaccttactaagctgtgaagtagttcaaggaaacatgtcaccatatctagattttttgactgtctggcagtatcaaacctgaatcaggtagataagtatcatgtttattgggaaacagtgcagttgggaccagttttaggcaatggcaatcttatgggaagagcttagaaaggaaaccactgtcaaagtagctcgagtagaatttttatcttttaagactagtcaagaggaggagggaaagagtagatcaaggagttccatttgtaactgtgaacaatcaatggagacaactcactaccttcagactagccctcgggtagagtggaccttaggtaacaaaaggccacctagagaatttagaaactccttggctgtcttctcattttggccaccaaattatccggtcagatcataggtataaacaagctgcagggcccttaggccaagggttaaatcaagagggaaatgatcacattccttcaaatatagaatataatattcctgtatgatttggcatgactggagaaatattaaataggtgtaacatttcttgcttaagaaagggctggtattccggccatagtggctcagacctgcaatcccagcactttgggaggctgaggcaggagggtcacttgagttcagtagtttgagacaagcctggacaacataatgagacgccatctctattaaaaaaaaaaaaggaaaagaggccaggtgcagtggctcatgcctctaatcctagcactttgggagtctgaggcaggaggatcacttgtgttcagtagtttgagaccagcctggacaacatagcgagacgccatcactattaaaaaaaaaaaaagaggccaagcgcagtggctcatgcctctaatcccagcactttgggaggctgaggtgagtggatcacttgaggtcaggagtttaagaccagcctggccaacatgacaaaaccccatctccaccaaaaaatacaaaaattagccaggcatggtggtgcatgcctgtagttccagctgcttgggaggctgaggcaggagagttgcttgaactcaggaggcagaggttgcagtgagccgagatcactccactgcactccagcccaggtgacagaacgagactctgtctcaggagaaaaaaaaaaaaaaaggctggtaatatcaagaactattctttattgagtcgtcttttaatctgttgccaaataaaccatccatagaccctagtagcttgaaacagtgatttattatttcctgtgattctgtgggttggctaggtagttactgtgttggttacaggttcactcaagtgggtgccttcagctaaagggttagctgggctgaaggatccaagatggcttgccagcatggctggtagttgatactgagtgttggctgtcagctgggcaacctcagttttctcattgtggcctctatctaccatcctctggtagactagacaggctcctgacatgatggtctcagggcaattttccaagatagtgttttttaagtcctacctaggctctagaaccatcaaagcctctcttctgttgtattctctttgtcagcagttggcaaggccagcccaggttcacagggcagagacatagactccacctcgggattgggggcctggcgtggcagtgtcattgttgcaaaggaatttatggccactaaatggtttaccacaggtgactgcatgtactaggaactgtgcttggtgcatttaacagattatctcacttaagccacataactatcttgccattaggcattctcatccccattttaaagaacccgcaggtcacagaggttgtgttgttcttgcctgaggctacttggtaagtattggaactaggctttgactctaggtatctctccagctgagcggcattcatcttaagaacccaacaagtgggagacatatgctaacttgttcttcagcccctctaactcatttaataccacttcctttcctgtggggaacagccacaagaagaaaaaaagaaggcagcaggcaaagccctaccttagccacttcccttatcctaaggactttccagggttaatgagatccatgatttggaggtgagaagaacttccctgactccataggttctgacttcctaggtagcttggcggtgactgagtgatccctttaaaaaaagaacaaaatatatttggggaaaatcatgctttgtccaggttttccttgagttcacagagttggcaaaaagccatgagatgttccaagccaagagctccttttgtgatccctccaggaagggaagagcagtgatatggaaataagtacattagatgccaggtggaaaaggcagtctgtagaacctctctcttttttcccaagagtctccccagacagtagagagccacctggtctctgcttcagcttcagggactcttcctagcatagacttcttccaaggctggagtccagtgttttgtttgaaatgttgatttccttgaaggtgggctctcaagctgtataagcttcaaaaccgttactttttatttgtgccagctactatattaatttgacctcccaattactattgtctcctggctgaaggcattctgatttatccaaaatccaatggctgtaattgtaactcataggttgaaaaacaaagatttctttataaaagttttaagtgagtctgtagtcccagatactagggaggctgaggcaagagaattgcttgaacctgggaaatggaggttgtagtgagccgagatggtgccactttctagcctgggcgaaagagtaacaccgaaaaaagttttcggtggagtgagatgctagggagcaacatttgtcacgtaaatcacatgtgtactctgaggcataaggcctagaaaatgacctgaatttcctaagggtagaattcttcaataagtttggagttgagaagcagaggagctgaagggagagatggagaaggcctttttctttttggcttcattctgcttgttaagcattataaaaacaaaccccaagtaaaggaataaatgtaaatgaaataaaacatttaaaatgagacaaaagataaaaagttgatgcaaaatagatgaattatgtcagatttaatttatttttaaattaaaagctagaacatgtaaatgtaagctaagaaaataggaataaaagttttgttaaaatccagttaaaattactgtacctataatggaagggagaactagttaggtgttgtggataccagtgggagaaatgatttcttggaacagcaggaattttcagggaggggttaaagaggtgggatagcctcctacccttgctgtgtcagaatatcttggtgtagggactctcggttgtttgaaaaatctatatcaacagaactcttttgctcccgcaaaacaaactatagaaattcctacaagtagagaagactttgtagtctaagcagaattgtatgtgtgtgtgtggtgggggtggcaggggagcctgggatatgaacattttaaaggcacttaattggatcagagaaagattcctggaaggcatttagtataggatgtacaaggaaagataggattatgacaggaaaagaaaagtcttagattaaagaaatgtgtagcagagttgtgactcaactgtcagatcggttttctgagctttggtagcaaggtggggccacccccagcctttgagtatggatacttttttgctgagagtggatgacacagagcttagtttagagaacaggggttagcctccttcctaatctaatgtctgtggttgtaattattatatacaattatgagaaaaataaaggtctattagaaatgtgtgaaaagttaagcttaaatattttgttctttgttataatcaaaacaatctgtaatccaaaaagattgtttcaaggaggtgtcagttgccagggtctgtagcaggcagaattgatcagtttctctttaacttgaactctgttatgtactcttggaggagtaagggctgaagaaataggaaatagagaataaaaatataaaggataccctttttcaaagttcagtattttagtcgacagggaggaaccatagagaaatcttttctatagccatgagcaattccttgttaaaccttaagtaatatcatttatctttgaaagggagtgtaacaggccaggcgcggtagctcacgcctgtaattccagcactttgggaggccaaggccagtgggtcatctgaggtcaagagttcgagaccaacctgaccaacatgttgaaaccctgcctctactaaaaatacaaaaattagccgggtatggtggtgggcacctgtaatcccagctactcaggaggctgagacacgagaatagcttgaacctgggaggcagaggttgcagtgaaccgagatcgtgccattgcactccagcctgggcaacagagtgagattctgtgtcaagaaagggagtgtaacttaattatatgaacatagggcttcttcacctttcctagcttggtcttcttttcctcccatttggttcaatttaaaaagcagtaccatgaatattagaggatttatagaaattgggttgacttttatgcagctggcttcctgtagacttttacactcacgataatggttctttaacttgatgctcagaaaagaaaaagaggtggaacattttcttcatattatcctcctaagtctttttccctatatgtctcttcacatacaattaaaacaacaaaaagcaaaaactataactgcagttagctgagagctttatatacattcttttagatgcttaacaatttttacatgatggaaaagtcgaaaatgagtagttgacattctttttctttattttatttaatttatttttttttgagacagaatcttgctctgttgccaggctggagttcagtggtgcgatctcggctcactgcagcctccgcctcccaggttcaagggattctcctgtctcagccttccgagcagctgggactacaggcacgtgcctccatacccagctaattttttgtatttttggtagagacggggttttaccatattggccaggctggtttcaaactcctgatgttgtgatccactggcctcggcctcccaaagtgctgagatcacaggcatgagccacagtgcccggcccgacagttattctttactaaaatttcaatgtctttggtcattttttgacattttgtcaatgttgagatagataattacagtgtaccacctatatgaaaatgcagacaaaactcagaatgggtgtaggatggtatgccttttttggccagggttttttatttgtttctttggcttggtaaatagctcatcttctgcagtgatgtgcttatttacaaatgacttagagtttgcagatagagacttttacatcctagagtgttaggactactggtggtggtaaataagtcaataaatcagtacttctgcagttgataagaatgttaaagtacaattacaggttgtacatgaaacttttgaatgtatatcatgttaaaaggagcttacagtagataaatatactccatttataatggtactttttgctgttggacatatttggaggtgagaatacttctgaagtcagtatactttcatgcggtaatactatggttgtcagttcagaaaattccttttctagtattgtgattaccctggtaaaacaaggaatctataacactagcagaatggaaagcacatgtaagagtatgtctgttattataactgttttatttaacatatttattgagcataaattacatggaagacattgtgttgtgcatggagatttaatggtgaagggaaaaatgccgtatttcccacccttatggggcatacattccactgtgagaaggaaatgtctgtttaagtcgcagctgtaaaggagagggacatgcagcatgagggcaggtaatgggggaattaacctgttgacagagctcagagaagacagctgaagaaccatggatgtgaacttgggagtagaggggtatggaagggagttagggaataggatgtgcacaggccttgtggaagaagggaacatggcatctttaaggaagagaaagaaggccatgttagctggaatgcagtaagtgagggcaggtgccaactgaggctggagaagatggagtcctcgtaagagcattgagaaacaaatgaaggttttaagatgagggtgggtaaggaagtgacatgatcagagatggcttttagaaaagattctcctggagccctccaatttgttcttcactctaaggagaccagtttggagacagtccagaaatgtgatgatagtagcttgagaagaaaatgcatctttttgatagttatttaagaagtataatccattggacttggtggtagattgaatatggtggcagagttggaaggtgcagaaagcaggttatcaagggtgactcctgggtttctggctgtcagatctgaatgtatggtgcaataggttgactatggtttgtccccatcaaaactcatgttgaaatttgattcgcaatgtattgatgttgggaggtggggcctagtgagaggtgttagaatcctgggggcagatccctcatgagtggcttggtgccattcttatagtagtgagttctcattctggcaagagtggattagttcctttgagagtgggttattataaagctgggacgccacccaggttttgtctctttacacatacctgcttccctctttgaccttctccactatgttatgacttagtacaaaagtttttgctagaagccagggccatgcccttgaacttctcaacttgcagaattgtgagctaaataaacctatttttcctttataaattatacagtcccagatgggcgtggtggctcacacctgtaatcccagcactttggaaggccaaggtgggtggatcactagaggccaggagttcgagaccagcccgaccaacatagtgaaaccctgtttctactaaaaatacaaaaaaattagccaggcgtggtggcacacgtctgtaatcccagctatgctggaggctgaggcacgagaatcgcttgaacccaggtggtggaggttgcagtgagccgagattgcaccattgcactccagcctgggtgactgagtgagactccaactcaaaaaaaaaaaaaaaaaaaaaagtagtctcagatgttctgttacagcaccacaaaaccgactcggatatttgtgataaccattcactgagatgaagaacctagctgaggaccaagtgtaggggtcaggttatgagcttggtttgagatgcctttgagacactgtgtagtaatatcaagtagcagtaggctatatacattagctcagaggagagatctaggatgaatatttaaactttagatttttctacgtttaagtggtaactgaagccacaggtgtaggtgaaatcacataggaaacaagtagatagaagatggtctggagtcttaaagaactctgttatttagtagctgggtagaggaagtgtggtgttatggaagtacaggaagaaagcatttcaaggagaaaatggtcaggatctgatgttgtggagaggtcaggtaacatgaaagctgcacatagcagtcattgttaaccttagcaacagctattccaggagagtgatgtggatggggacaacagtggagtgtggtgaagtgtcagatgagaaatgatgacagaatacaggcaaatatttctagaactttgtctgtaaaggagtggagagagagagagcgcaagtgtaaaaattcaagcaagagagagaaactttatggaaagagaggattgaagaagaggttgtaaatctgttgatttttgtttttgctgagaacttgagcctgtttaagagccaatagaccctggtgtgtgatgttcccgttcctgtgtccatgtgttgtggggtggggggacggaggagggatagcattagcagatatacctaatgttaaatgatgagttaatgggtgcagcacaccaacatggcacatgtatacatatgtaacaaacctgcacgttgtgcacatgtaccctaaaacttaaagtataattaaaaaaaaaagagccaatagaaagagccatttgagagggagagagtaaaggataatgtggagcaaaagattcccaagaaggccagaaaggatggatctaaagtgcacaagttagagaggttgaccttaggtgggaagacagatagttacagatggaggtagtttgtatagttggtagtgtgggatattgaacgttttcatatgttggcttctacttttttgtgaagtaggatgggggtcatctgctgagaatggggtagatggatggtgttttgaaaagaatagggacaatttgggaattttattgtggactctgagagggttggttggagtggcaaatggttggagtggagggcagtgttgagggctgtctgatccctctgtaattctcacacactggcttcaaccttctcatgtgtgacattctgcaacagagctctgattgttctggactcattgctgagtaaatagttgggcatatccaggattaggattttgtcaactcttggcaatggaaagggaatttgggtgttagagtgctgtggaaatgatggactttgggatgtaagctgattaaagagggatgtacaagcagaatagggctaatgggttgggaaaaagctgagaggtcagtggactgataatgttgtaatactgcacagcttgaaggaaagaaggccctggtcaacaaagggaatacttgaagcgttattttcgaggcagaaaacgatgtataggggacaataaaggttcatgggtgggtaaggtggcatggaagacatgccattccaggtgaagataatggactgagtcgtctaggagatgcgagccaacaaatgggcaggaatatggcagggcttgacgacatcagtgagccagggctaatgtctttgagtaagcaaaagtgattgggagattagaatataacagtgaggaaaggaggagggtggtgtaactgaatggcaggaccctaaaaaggatatgggtgtttgcagtgggcaggggaatggagaaataaggcctgaaggggcagaggtgccaaggccatctcctgactccagagtgtgagaggctgggcagctgctatttgagagggttgcaggagaagaggggtgtcttcagcatgctcagaggagaggccaaggatatgacactactttctgggtgtagagcagcagttccaagggacctagaggaaggttgtgggaggtggagagggtgatgggctgggaaggaacttggaagcaaaacagcggtactcaagtggtagaggatagatctctgcagtgggcactgcctacattttaagtgttgcctgatgaaaacaggcatgagttaggggtctagacctggtggctgtaggatggttttattttccttgactagagtgacaacaggcccagagattgtatgtcctgtgtgctgctggaggtggatgatggtagaagcagagactaggtgcacaccatatgctgagtactgttctaagtgcccaagaaacattatatcatttatttcctattacaaccatgccaggctagtactgttgatatttctgtcttacagatgaggaaactgaggttctgttaaggtaagtttagtaatttttctaaggctacgcagctagcaaatggtagaactgagactcaaaatcaagactttgtgcctgtgtacctcccatgatggtgtatatacttaacatttccttccctgtgaaattattatttttaacatatctgatagactgttgagaagttaatgtaataggaattgtctttctgaataccaaaattaaattcaattttagaccccaaatcttgtttgcagagtcctctgaaagttagactagggcccctgccttctgcagacaaccctcccagctcttcttttaccacttccatgatagacacttggacacttctaaagggctagagggtggttaagttaaactgcccacttgtgtcattttgagtaatgcagaataagttcctggtctcatttttttgtacactttttttttttttttttttgagacagagtcttcctctgtcgcccaggctggagtacagtggcatgatctcagcttattgcaacctccgtctttcaggttcaggtgattcttgtgccttagccccctcaagtagctgggacaacagccgcataccaccacgcccggctaatttttgtatttttagtagagatgggatttcaccatgttggctaggttggtcttgaactcctgacctcaagtgatccacccgccttggcctccgaaagtgctgagattacaggtgtgagctaccatgcccagccacaacacttctttaaatgttcaaggaatgctctcaagttcgttttgttttgtttttgagacagggtctcattctgtcacccaggctggaatgcagtaatgtgatctccgcctcctgggctcaagtgattctcccacctcagcctcctggtagctgggattacaggtgtgcaccaccacacctggttaatttttgtattttttttgtagagatggggtttcaccatgttgcaaaaggctggtcttgaactcttgggctcaggtgatccgctggccttgacctcccaaagtgctgggattacaggcatgacccactgagcctggcctgctctcaagttttcaagttttttttttttatttttttttaagaaatcttgttcccaagctaacattactcagcctcttagctctttatgacatgataagattaccatctttacaccactctaagggtactttggtatgtaattaattgggagtatatgggactgatgcttgatcaaaagatgcacttccactctttctgagtataaatgagcctgaaatttgtttttttttgtgtgtgtttagtattgttgttatactgttgtctttcattgatttgtgtcacttacaatgctaaggtcttgtgtgtatggctattatgccaagtcctatactttggtattgcctttaaaaattttattatattttgcctttatgatttggattcattatttcagctaatcaagataatttcaaaacctgattctgttaacttaatgtattagctgtctttcccacctctgtgttgtatgcagcttaagtaaacatacaaatatttacaaaaaatatttgctaaaacaggaccaaaaaagagaaaattgtataaaatatcaagagatatttctcaattctactttggatcattaatttacatgctgcttctagttttcagctagctcttgggctcactaactttgttgatctagccactttttttggtatttttcataaggctatcatgagaaactttcagaactttgctgggatcaaggtatccttcacttggtattctccaatctaccaggatttgttggtcagttatttgtggaggtaaggtataggaaggaatccaggatgactgagctgttccaggttggaagatggggcagtattgtggatgtccatgtcattcattgaggtatggcaccacagagaagggctggttggggttaagttcaacttgggcgaagtagaacctgtggggcctctggatgcacaaatggagcccatccagagggtggctgaccattcagggctggtacatggcgggtggtgaaatctagttgcacacagtataagcagtgttggaggtgcagggcgcatagccaggcagaacctatagtatgcagagaagaggttcaggtagtgggggttggggggaggtagtaaacattgccaagttaaaggtgtttatgcctgatcgccttcattttcttggtcaaatgggaagaaacctcatctattttaagagggagaactagagatttgagagcggtgaatatttggagtcaatgtgggaaataggaaagggagcttgccagggatgggaaaaggaatgctaagcataattggggcattcttcccagcttcccccttctttgctgcccttaaagacaaacacacagacccatccccttctttttagggatttttactgcaaaacactccagcagtggttctcactgggggattatatcagaaaatgaaggagaggggttatgtatgtgcatggaagtggcactggtatttgatatattctctaaggaatccctgtatttgcaaaggaatcacaaatgggggaaatgagtgagtgatcgtgttttggtggggaggggctggtaatcctaacctcacctactagaactgagtctgttttttctaaagtcaatttcctttaaaattgccccttcttcccctcatcccctcttccttcttcctctctgtccttctttcctcctcctcttcttttctctttccctccctccctccctttcttccttctctttttttctgaaacagcgtcttgcacggtcacccaggcctgagtgccctggtacacaatcataactcactgtagcctccatctcctgggctcaagtgatcctcccatctctgcctcctgagtagtggggactacaggaatgtgctactacacccagctaatttttctattttttgtagagacggggtcttgttaatgttgtccaggctggtcttgaactcctggcctgaagcagtcctcctacctgggcctcctaaagtgctggaattacaggcatgagcccgactgagaactgagtcttttgggctccagcctaaaagcatcttattgggattttaatagaagagaaaatgtcctcttggtttacttttggatacctcctcactattatgtgttacctctcctgggtatttattccttggaaagcagggagcattctcttagcaccctacacttaccactttgtgtggtgaggatcaatttctttgtatccctactggctataagcatgtctccctattttgtattccagcacagtgcctggctcatggtggaccagagacagatggatggactgttttttgatgtgaagactgaattagccctggcagtgctgtttcccagggccctatctctgggagtcctcctgctggaagggaagtgctctcatagctgatagttaagacatgtacagtcatgcattgcttaacaatggggatacattctaagaaatgtgtccttaacacaattttatcattgtgtgaacatcatagagtgcacttaacacaaacctagatggaatagcctaccacacacctaggctttatgacataacctgttgctcctaggctacaaacctgtacagcatttactgtactgaatacagtacagtactgtactgaatacattgtgtaggcagatgctacacaatgccaagtatttgtgtatctaaatactacattgtatagtatttactgtactgaatacatggtgtagacagatgctacacaatgccaagtatttgtgtatctaaattctacattgtatagtatttactgtactgaatacatggtgtagacagatgctacacaatgccaagtatttgtgtatctaaacatagaaaaggtacagttaaaaaatgtagtataaaagattaaaaattggactaggcatggtggctcatacctgtaatcccagtggtttgggaggctgaggtgggaggatcacttgaggccaggactttgagaccatcctgggcaacatagtgagacccagtctctacaaaaaaaaaaaaaaaaaaaatgagctgggtgtggtggctatgtgggaggctgaggcgggaggatcacttgagcctagaagtttgaggttatagtgagctatgattgtgccactgcactccagcctggatgacagagtgagaacctgtgtcaaaaaaaaaaaaaaaaaaaaaaagataaaaaatgttacaccacctctgtggagcaattactgtgaatggagcttgcaggactagaagttgctctaggtgaatcactgagtgagtggtgagtgaaagtggagggctaggacattactgaacattactgtaggctttataaacactgtacacttaggcaacactaaattgattttaaaaatttcttttttcaataaattaaccttagcttagtttcttttttattttataaacttttttatttaaacctttgattttttttttttttttttttttgagacagtttcattcttgtcacctaggctggagtgcagtggcgtgatcttggctcactccagcctccgtctcccaggttcaagtgattctcctgcctcagcctcctgagttggtgagactacaggcatgtgccaccatgcctggctaattttttgcatatttagtagagatggggtttcaccatgttgaccaggctggtctcgaacacttgacctcaggtgatccaccagcctcggcctgccaaagtgctgggattacaggcgtgagccactgcacccagcctttgattctttttaataacacttatctgaaaacaaacccattgtatggctgtagaaaaagattttctttatatccttattttataagctttcttctatttttacaattatgttattattattttattacttttttgttaaaaacgaagactcagacacacacattagcctaggtctgtcagaaccatcaatatcattgtcgtccacctccacatcttgtcccactggaaggtcttcagggataataacacacatggagctgtcatctcctatgagaacaatgcctccttctggactgcctcctgaaggactttcctgaggctgttttacagttaattgtgtgtgtggttttttttaataaatagaaggaatacactgtaaaatcatgataaaaagtatagtgtagtaaatgcttaagccagtaacatagtcatttattatcattgtcaactattatgtactgcacataattgtatgtgctagacttttatatgaccgtcagtgcagtaggtttatttacaccagcatcacctcaaacacgtgagtaatgtgttgcgctgcggtgttatgatggctacagcgtctctaggtgataggaattttcagctccattataatcttatgagaccaccattgtatatgtggtctgtcattgactgaaacatcgttatgcagtgcatgactgtacttcagaccttttcatgtttttccctactaagaaatcagtgtcaattaaagtttatgtaaaccatctttaatgaaaagtataaacattatttcattcaacaggtctctggaaaagtttctttgatgtccacaattcctgtgaatcaagatggactaattataatgtagagttcatgtctagacgctcttgtaaattgctacagaagtatttcccttatctgtttcagctgctcttcgctaggccaaatagtatcccagctttctgccagctactagctacctgtagaggtatatgaagtaggtgtgcttttccagttttactgtatattcctatacttaataatcaccaaactcttgcaggcccttaacatatgttagtaatgagcatcctttggttttatcactttttaccatttttcttgcctgattcatgcattaaagtgaatgaacaggggtagctgcttcctaccagaagccttggttttctggggaaatttgtaaagatctctagattagttcttgatttggcatgactgattaagcaagcagctgttcactaagaggcaaagctgagagtagaacaatttaattggcttctatctgttgagcttttaatggaagtcacagcttgaatatatggagctctttatttagttttaaatgaaacatttttccaaagggagactctaaacatatatcccaaagtcttacctgataataattctgttcaaaatataatattcatccattagaacaaagacttaaaaactcgatttttgggcgagggtgggatgatacattttttaatggtgaattgtttgagtgcttttaaatacagtagttaaatgaacaattcataaaatggataaggtatgatatgttttatgacaccttttaacattcatgaaataaatgctttgtatacattgaattttaacaaactaaatgagcagcccgtgcccaccttctgctctaggatcagcagagagcatacgaaagtcttcaggggaaacctcctcacatttaagattagattctccattctcttctgattactgattatattttttttccaattttgtgtccatctggcctccagatacctatttgctttaatcttagaaaagcattattctccttacatcccacttagcaaattatggtaatgcttaatttatgtacaaaacttttatgtattgtttggttaatattaaacctaggctaaaagaccacaaattaaaattttaatacccaataaacatatgttgaattaaaaagaagtaaaagagcagtaaagttaatggagtctcatagagaagaattgtaatatcaatatttttaccaagtacacacacacacacacacacacacacacacacacacacacaaagaatgaggaaagaattcattatagacatatgaattctgatggaaggggccctgtgggagattgattcttattacgatatcctggttggaagggaatgaagtggggttattgctagtgcagtcaatgacttggcttttctctggtgaattgatttcagtaggtgactttatttctttgcattaggcagctggaaatgtgtattgatttatttctttttcatttgagaatcagctttatcaaagatggagccatagaaatgctgtatttgctggatatgagcaaatgccttagtgcctttttttttttttttttgctctgaatgttcctaagatttttaggagccaaataaagttcagctcaatgaaatagaaaacacactttgagtgtgcatatatgcatagtactattctttctgctaactcgattgttaagacctgaagctcttttataaaaatctttttttttttttttttttttaataagggatacaaagccctgcaggccttttgctccaagaatgtgtgtgattgaagagcatgttttaaaagttaaattctcatttgtgcagtgacggtgttagcggtggagggtgttcaggttcttggcattttgaacaaagaattagacaaaatgcacaaagcaaggaaggaatgaagcaatgaaagtagcgatttattaaaaatgaaagtacactccacagggtgggagttggtcctaccataggggctcaagagcccggttacagaattttctagggcttaaatacctgctacaggtttcccattggccacttgttgtacaccccatgcaaatgaagtagtggcccacaatctaggccggttgtggtgcctcacgcctgtaatcccagcactttaggaggctgaggtgggcagatcacgaggtcaggagttcaagaccagtctggccaacatggtgaaaccccgtctctactaaaaatacaaaaattaaccgagtgtggtggtgcgtgcctgtaatcccagccgctcgcgatgatgaggcagcagaattgcttgaatccgggaggcggaggttgcagtgagctgagatctatcgcaccactgcactctagcctgggggacacagcaagactccatctggaggcggggttgggggcgtggcggaggggaggggaagttacacttctgtgcaaaggaagacttggctggcagtcagtcagattggttggggaaagcaaccaatcagaggctgaaatgaagttataaagttatactcctatgtaaacgtctgattggttgcggaaagcaaccaatcagaggtactttcagttttccatttgccactcagaaaagtgagggaggggttttcaaagcgagtaacctccagttattttgttagttaggtgtgtaaagttgggcttttctgtttgatttagttctaggaagtcagtatgaatcggccttaggttccctgcctccagaccctattgtcttgcctcaacagtgcaatggctctttgctaagactgtgttcttcttaagattttaattttgttttaaatgttgtttgtcctgctccaaaattagttttttaattatggaattattttttgttttgttattacaggcagtgttagttctatggtttttggcttgattgtttcttagaaattatgtaaccaactctttcatatcatagatgagaaattgagggataaagaaatcgatttgtcataaatttaattgaaatattattagaagaatagtttttacttatagtacttgaaattctctgttaatattaagacttagataattttgaatatcatgatgttaaaattataaatgacacctctaatattgagatctttaagataaaacagacataagatacatgacaaatagatggtaaaggtgaagaaatatacaaaaggtcaaaaattcttatagtttatattcttaacatttgttctaaattttaaaaattactaaaattacaagacatatttcttaaaataaaaaaattactctaggtttattatgagacaacaatttatagctgtcatttatcttaacaggttgaagaaatatggagatcaacacaaaactgctcatcagtgttacctgtatcagctttttcacctttcagcttcttttctactttgtaagttactggttttcagcaaaagtttctccaggtttcaatagtctcagcttcaaaaagaagattgaatggaactcaaggtaaagcatatgaaaatgtaattgatgacaagaaactagtttatgagataaaattatttaaaatatttcaaaaaagtatttcatttaggatctaatgtaaggccaaatttttatttgatcttagaaataaaaggaaaaacaagtagatgatctcatgcaaaaaaaagtttaagaattcatatattgaaagatgttaggagaaatttacttaagtttctgaggaagtgtgtgaagatgaagtagactccagctgactgtggatgaatactagtactttcgtgttcttctttgaaatatttataacaaacatattctttggaaacaaagatggaagaaaaaattagttgtacttttgagtagcttataccatacagcattggccaacttagccagacctggggcagttagactctacacatcagggaacaaagtgtacagtcagtgcatatgaatcttttaatgaactttgcattataatttagagccctccagcatttattattttgttatataattttaaagtaaaaatttctttttagttttttttttttaaacagaaaagtaaatggagaaagaattagacatctattgatatagaaatctgctggagttttattttttatttttattttatttgtttatttatttttttgagacagagtcccgttctgtcgcccaggctggagtgcagtggtgaaatcttggctcgctgcaacctctgcctcccaggttccagtgattctcctgcctcagcttcctgagtagctgggattacaggcatgcgccaccatgccaagctaatttttgtgtttttagtagagacagggtttcactaggttggccaggctggtcttgaactcctgacctcaggtgatccacccaccttgccctcccaaagtgctgggattacaggcatgagccactgcaccctgccagagttttaaaaagttggttgcaatttttttgtgtgtgtacaacttattaatctcacaagatttcaaacacaaaatggctctgatgacttcttcacgtgctttagagcattttatgtccccaaacatcactgtgcatttgtaaacctcagtgagtcagagcagccgtggccttattttttgttgttgctatttagttgaagttaatactaaccataaaatggattcagcaagtctctaaagtttgctataattatctttcattgaaatttccttttaaaattcaagaaattctgtcagtgtctgagtatttatttgagaatggtcatatttgatttgaaattccctttgaaccaaattgttttgcaggcatctacttttatgattcagactgtgaatttaataagactctagttgtttttttttgtactttacagtgatgtatcgggttcatacatgtcaaagttcttttcacccaaaaagcaagaattatttctccacatattttcaaaaaataagcagtatgattattttgtcttaagactagcacaaaaatattgttcaaatgcattatactagagataccattactttaaaaaatcttttctaacatatgaagatagatggaatggtaggaaagagaagggggtacatacgttctctgattaaatgttgaactattttcatttcctctttcctgtggttaggataggtaaaggcatttgaatgttaggtagctgcaagtcagagaaataggaaagggtacagagagatggaagccaagatgaaaatgaaatgaaattgaagaatattttgcattatctagtcttatcactgccattctatgacacaggaaataccatttgggaaactgaatttctatttgaaaaaggagtctgggattatataaaattcatttaggtattcagtggtgttttctctttttctcaagtttgctcctgcttctcactccagctttttttacaaaggacttaagctgtaaggtggagagtgcaaagtaggacaaggaggctgtattttgagtaaaatatgtataaatgtcttaaaattcagcttccagtttgaaacatacaggtaaacacacataattctttctagtgatcaggaaagagtctctaaacatgagttgagagtggtctgagccatctagtataaaaagaaatggaggagaaaaaatcactggaaatgcccatttgagagacaacagtttagttaaaagtgagaaattgttgtactgaattgttactttttctgaaaacgtgtatacttacaggtgctacatcttataatgtaaaaaaattttcttaattacttatattcactttcttacctatcacattgaaagtcttattgtgttgaaatactactaatttttaaatgtttctctaaaatttagctgagttatataatttctgttggcaatatttacactacttgtgattagtaacttaaaattgctattctaaaatagtcattaatcatttccttagagtgctatccctttatatgcacaaacatttcttttccaccctctttgaaaaaaaattgaaatattttatcttgggtaatatcttggaatttctttttagatactaaggaatctaaattttcctttgctaggaatctgattttaaataataaaatataaaatttttattaacagaagtttctgaaactatagtatagacttttaatacagaatagtgtatgagtgagggcagggtatttgtttttcctcctcattacagagggagatatttgattggaccaagtaatatttaacttttctgtactgaatcatacaccatttccatcagctgagggcttagaatgctttccatttaccacataacatctcaaaagagaagtgaatctgaggcctgagtgtcagaaataaaaagttaggtttttcaaaagggagctttctgactatggttaccaaacagtaaaacaagtttgtaagagagattatatatttttaaattttatataatttttgaatagcaatagagagtgggctgtatgaccatttaaatggagtattttattttatatcaaggaatttaatttttttttttttttgagacagagtgtcgctctgttgcccaggctggagtacagtggtgcaatctccactcactgaaacctttgcctcccaggttcaagtgattcttgtgcctcagcctcccgagtagctgggattacaggtgtgtaccaccatacccagctaatttttgtatttttggtagagatggaatttcaccatgttgaccaggctggtctcaaactcctgacctcaggtgacccgcccaccttggcctcccaaagtgctgggattacaggtgtgagccaccatgcccggccaaggaatttacatttttatcctgtgctcaaggtgtgcttggcatgaaaattatagacttgtaaaccagataaattggattaattattcacatttcaaaatgattcttaggtattataaatgatacttggtcaatgcctttaaattggtgagaatctttgcttatttaaaatatggcttgatttagcatgatacatctattttgtaacacactattaggtcaagtatattggtttctaaagttacaatgaaattttctgataccaaacctaatattagttgatatattttacttttaaagatttgggatcatattgtagagaaaaatttattgcacaccagtaatttttagagagaaaactttgctgtacctctcattttttatcctaatgaagtttcattacttgtgaacttctcaataaagatgtgagaaatctgaaattgttgggtaaaaaaactttattgtatggatgaatacacagtatcctaagtatagttctctaagtaacatagagcttgggaattagtcacatcattaaatttattaacaagatatattcatagaaacttatggtttttatgttaaacttattccttctatacaagaaaacttgacctggatcttgagaacattgtgctttcacttgggtatttcttttaaaaacaaattttccgtatacatttatggtcctcaatttttctatttagaaatgttttcataataatgataaagagggactaataatagctacccttgttttcttacaaatttgttacaagaatcaagtgcaatagtgcatgtcaacgtactttaaaaactgaagcctcccaagataataaatcttcatatcatgatccattcgaattgttttaaggatatggagtttgttaaagccagtagatctggaagtcattcccagctgattggagcaggaaacttatcctgcattgatgctgttggggctggagcttggagccaagggtagtggccttgccagttgccatctggctgcacaaaagtctgtcagctgcatcatcatgtatgcatttatctgtcttagaacttttaaccaataagtgattcaccagttctctagcaggaaattgtaggccttggtatcttcctccttctttattccaaagtaaagctgtggcctttggatttctaaatggcaagaaatggcaattttgcattatactctccgttatacttcacacctgtatataaatgcttccaggtataacttgttcagaatgttctgtgtcttgtcaggattaaattttattgcaaagaatctaaaatctttgtgtgtattttgtttaatttcagggtagtatccacatgccattctttggtggttggtatttttggcctgtacattttcttattcgatgaggctactaaagctgatccactttggtaagctgtttctttttctaagattgccaatttcatttatgttttgatattaattatttataagaacatcacttactttaaaacagaaaacatattgatcgtatatgccttattaaaatgcttgtgctcagacattctagcaaagtgcatttaaatgatttattttagatttgaacacaaatgaaggccattttgccttagtgtagcaattgttatccaaaacaaggagaatatgatgataatttaaacatttttactgtgttaatgagtaaagccaagttattgtagtcacagttctgaagaaaaataaatcattattgagatagggtagtcaacttggataatatctacttaagacttttttgtctccaatttatgtttgactcatttgatatcaaagagatgaaatgagagttacagatggccatgtgataggaatttagtaccacaggatttgaagcactaatgcactaataataactgtgttcagtagtaataggataacatgtaagatggtccttttagaaaaatttaaatgtcattccaatggcagaaattttgcaaactgtttcctggtgttatatgagaaggcttagttcagcttagtttgagagagcaggcatgtttgaagaagcactgcactgagatgaggtagttgtgggctccgggggatgtagggcaatttagccttttcttttgaccaccaccatttgactgcaaggacgtttttctattcataaatataaaattattcccagaagaataatatcagtattgatacattttcattgggatgctgtttttcaaagagaattaatttattgaatttaattccatgactaggtttttaaatagtctacctacaaaatttctagctttttaaaaattttcgttttcattttactaacgtgaccatcagcaaaataaaaccagttcttttgggaagtaaatttcataacaaagatttgattcattgttcaagttttgccttatcgaactttaacataatttttgatttgaattttatgtcatgatttactccaggtcaaattttcctggttatatttacagatcaaaatttgtaaagaaggcacaacttgtgctaaatctttctattaaatatttgtagtccagctattttagttagtgttactttcactagtagttcactttgtaactatcttactatgtaagataacagcagtagttaccttactgctaacaccagtaccacatgatgcgtcacagtttggctaaactgtcattgtgtgttttgcaattttatttgaagatgacagcttaccatttgagaatctatagaaagcaattttattatatttaaatctctatagaaaaaagaagtagcggtcatctacaatctatatactttaaaaaggaaccttttttttttttcaggggtggtccatcacttgcaaacgtgaatattgctattgcctcaggctacctcatttctggtatgtgagatgttgttttattgtctaattccttgtaaactactcacggaattatacaaagaatatatagtctatgcttttggtttatttgagagatagcatttaggaagcatacagaggaaaaaaatacctcccatgatggtagaacatgaaatgtcttttcatgaaatggttttctgtttctcactgaagatcagagttacagagtgatgcctcaaacaactgaggcctggacattttttatcagcaaggatatggtccctctttgtcctaatgaggctcttaagtgtaatgactgtgaaactaacgaaatttaacttttagggtccctcacttgcaagagttcttgaaatgtgttccagtagtcatggttttgtgttgtttttgtaaaatttgcagaagtaagcttttttctttgtttttctttttaatagttatagtttttggtggcgtcactattttgaattagtatttaattgcattcttttttatttttaaaatattttttgtacgatttgttttataaatgagttggtcattttgtaccttccctatgaccatcttatctctgtttgaattattgtagtgacaaaaatcagtcacttaagcttatttaaaattatttctattcaataatattttttgtttattttaactctggaaacaagttattcatttatgctttcaacaaatattatattacatatgattaggttggtacaaaagtaattgcagtttttgtgattaaaaataatggcaaaaatcacagttacttttgcaccaacctacatgccaggccttgtgctagattctgagggtttaaagatgctcacaacctggcccttgtcttagaggagccacaggagtgtggatgagacaggcatataggagcagagattttatggtaaagtagataatcagactaactgagggatgaacaaagtgctgtgggctcagagtggacagtgatgagttggcaggagaaagagttcaatacatttgaaaaacagtgcaactttcttcttatgtaataccttactcacttttctttcttacagatttgtccattataattttgtattggaaagtgattggtgacaaattttttataatgcatcattgtgcgtccctgtatgcatactaccttgtactggtgagttccaggattttctgtagcctaactagcagacaagattgggaatagtgatgtaaaggtgaacataaatctaaacatacaattcttagtttttaaagaccatctccagatgcattcagggattgcttttgtggtatgctatcttctgtattaactaaaataatacctttatgtgtgtctgtgttggtgttggtgtgtctgtttgtattcatagattttgagacagacaaatgaccctaattctttgaatttccatttaaaaccttcaggattgttgtagctatagatatttgtctgtatttctagatgcatttatgatttaacagcaaagagtatgagccagcgaaaatatttcttttctgtttaattccatgtgcaattacatatacataattacatttaagtaggttggagcagtggagaaatcttgctcagactttttcagaattccaagaccaaggttaatagaggattcttccaacagatctcaggcagtaaagcatattaaattatatatctaaaatttctacatatacatatgtaaactagcaactttatattccttgtatgtttgttaggtttctctagaatcaattgtttttcaacataaatataccaacaagctcaaggtagatattgcaactgcaatttttttcataaagatggttgcttttttgatatgtctatgttctgttgttatagtttaaaatttgtcttttaaagtgaatctattcatagggaaacaaaataggaaaagttagatgaaatgatgaatgttaacagatgctataaggatcctatgttatttaccaatcttacagtagttactcattgactataagaaggtttttttctatgcagtgaattcccaggtcattttgtgcattttgttattccaagtaaagctaacaaaaataataataattataattttgggggggtaaatgatcatgaaattcttatcacttatgcaataatgagaacttgtatttggaaagcactttgacttaatacttatgtaaccatttaagctgtttgcagtaagctttttttcttaaatgattttgttattagaaccaaagtaaaacttaaagtgatgaatagaagcaagttccctgcagttttaaaatgtatccttactgaagaaatagttgaaaagtaagattctttggaatttaaggtattataggttatataatgtcttgattgctatttttgtatctttctactatatttactgacgttttgaaattctctggcaaagtaatttagagcttaatgaatcctcttctgtctatatagagaggtacaaatcctacagccttttttcctgatactcatctttcacccctggagcaggatactaattatcaaataaacctgacaagctgatctcttattctaagagaaatgaacacatttatgctttaatcctcaatttttaaggacaaactaccatcctttgtacaccctttctgactacattgatagccttcactttttgtgtatgtgttccttgtgaatcacttctttctccaattaaaccatgcctttagataatgagttagaatatatttggaaaacatttaaacttgaaaatcattcaatatgcatcaatttccaagcccaccatattattattatttattttcttttttttttgagatggagtcttgctctgtcaccaggctggagtgcagtggtgtgatcctggctgggcagaagggataatggggaattactgtttaatggtacagagtttccatttgggaatatggaaagttctggagatggatggtggtgatggttgtataacaaaatgaatgtacttaatgccactgaattgtacacttaaaagttgtcaaaagggtaaattttatgtcatatatattttgccataataaaaatgttaaagcaagcttatgagataactgaaacaaagttaggaaggagaactaataacatattggacaatgttattacatttttagaaaggcttcatcctaactataaactgaaacaaatgggtggaacttaatagtgataaatgttaagttttgcatttaggttcaacgatgcataaggataaagaatgacctggaggtggtagatgattgcatctcagttatgccaatttatcacatctgctaaaacagaaagctttttcaaatttagattctattagaggaggcctggtatccaattcacacgtagtttgcccagtcagaccacatccaagaccatcatcatctgaagtccctaaacttgcatgtatctggaagagagctgctagttaactgtagagaggagatattagattaggtagctattgtcttataacaaacaattgaaggacctggagatgtcagcctagaaaagctaagaactataaggacatgatggccttgaaatgtccctggaaatgtgaaaggactactaagtggaagggggagtagacttattctggattgattctgatgttgggactaggaccaatggggtggtaaagagaggtaggggagacttctattttatggaagaaagacatcctcagtgattggaagattatcacaatggaaaggccttttaaagtggctattctaccataagatagctttagtcagatagatataaaagtagatacaatcagcagaagctttaggtaggagcttgcactaaataatctttaaggttctattctaattctgagattctgtgatgcacctgttttgttgaaatgatttgatttagttctgatgcaagagaactagacaatgggggaattaacaataagctaagttatgtcaccaagttcttaagtaaccctaggaggaagaggtgaaagcagctggcctgccaatccattcacttccttgggggacaggaggggagaaaaagaaggcacgtggcccagtctaatctccttgtcaacaggacttaggataaattgagtactgatgtttgttaggaagaagaaacattaactctgaaatgcccttagcagtgtgtccctgggtaaggattacctatagtaaagagaacccagtatctataaggcacagctcattggagaaggtcatgtaggcacacagcaaggaaataaataactgggttgccagtggcccttgatgtcccagacctctctctgcttcatttgaattatttgatggtctctatctttgtaacatttagtagagcttaatgctaggtaggaacactgtttcacatgagtctgatttggcagtccagtcctgtgtgttagctcaaaccttcatctctgtcttataagcaaataatcaaaaaccttgaatgattacaattaagcaaataattattaaacatagtaatagattttgtttccaaacctcaattctaggttgatggtaccctgaaacggtttccattaataggtaatagactgacccagagtctcaagcacaattgaaatgtgcttgagactctgggtcagtctattacctgttaaaaaatgccccatcattgccactatagaacacggtcacgtttttacacaggattccaatttgggatgcccagaacttatttcctaccaacatatagtcgtagtgtagtgtagtgcagtgcagtgcagtgtagtgtagtatagtagggaaagggtgcccatttctgtccaggcctttggtggtagaacagtcagtatttagtaccatactagcagtagtaggtgcataatttagttctcttttcccccccaccttataaacctctggtcttagccactcttagctggtagaaaaatttcccatagtaagaaaatccagacttccataatcgcttgctaaaaggagaattttcttttaagctgcggaagggatcagaaaaatcctgttttgtttcccctcacagtcatgcagaggccatggcaaatgtagattttactctatgcaaagctccttaaaggtagatgacagagtagagacaccacactaaccataaataacttgtgagttttgccataatttaccaacaataaagtatcagaatttgtaattatttaaaaatattatagaaagatttaatcctatccctttaatagcatctatctcatttgtattttagtaggttttcttgaataggagagaaaaggataaagtaacaaggaattatgcataacctgaatcttatctaatggccacctatgctgatggacgtatgtgtcacatgtgatgctatctgtcattggattaaatgggcccagagtcattgatatattgacgggtacaggatcagaaaatatagactcaagattactgaagcatagttctgcaccccagtgtgactcacagaggttttttttttttttttaagatttttttatttttctttttttcctactggcaggatcaaccaggtattacagagattttgagctaaggagggtgggggataggggataacaataggatagaatgagtggtttcaattagggatgtaagatttaaatataagatactatttaaaaattaaagtgtcatccagggatcaatcagtaatactgtagtaatttaaggaatggaaagatcattgtgttaatttctgttaatttttcttctgaatatagatgttggtaaaaaaaaaattgagtttgtagaaatactgggcttagtaagtataatgttttctaggtctgattctccagagataactactgatagtacttgatgtatattcttgcagtttatataagttttacataaatgttcatatgtatatttatgcctttttgaattttctaagagagcttttgagatagatgggatttaaacccagccttcaaaaatatgcatatttaggttggaaaaaaaagtagggaaggctttctaggtcagaaaacattttgaggaaagtcactgaggagatgtcagatcttcatgggtgatactgaggacttggggtgtcagggtatgggatttgtgtagacatgggtgatggttgtacatatggatgagtaagatagggccagctgataggtggagtgaaaattcagactcaccagccctgcatttttgcttttcacggaatggttgtaggatctttggccagaaaataacttgatacaattggcatgttagaaaaataaagctgatgatgatatgcagaaaaaaatctgattggggaagaggatatcttttaggaggtgcttgaagtaatataggtgacagattacaaagaagctaattttgatggttatagtggtggttatattaatgaggaagaaacaaatctgactcattttgcagtgagtagagcacaatatctaatttggatttcagagaaggaagggaaagaaaagaccaaaatgatccagagcactagaggaagacgacaccatggaaggaaatgggagaagcagtttggagagatactgtgagatgttaagaggtttttggagatgcatggctatcccaggggaaagtggcccatatgccattagaaatgaaggtttgtgtaaagggcagtgcagtcagggtcagggaccagaagaagaatgatcaggcaaaggataactcggaaggtagaaagagaaccataaaagaatgcatttggaaatcagtggtttccaaaagcaatattggaagcaatattccctaaaagcaatattgtaaataaaaagctgagataaataatgttttagcagaggccatttaaaaaagctgttttaggtaattcatttttatttgaggattaggaaacattgacaagcaaaaagaaaaaatgatgccccaatctcacaacctatataattatattatttacttacttaacatttacatttaggaatgtacttttttcctatatacatacgggtttatgcatatgtcaaaaacagcatttctcatataaatatataatatgtatattacaaaaatgtgatcaaaactaaaatttaaattttcattttacatattgaagtggttctggcaatcttgggtcagaaagcaaggaacctatcaaagactaatgggactgtgtcagaaggacacaagatccaatatgaaggctcttctgttggcttaaaatgtgacattttgatcatcaattagaataatgactatggttgattgaaatccattgactcgtaagttcttaattatatttttaaaaaatgaaaggagaaagcaagccagttgggcagtcttgcttgacgtctcatgtgggtgctgttaaatggcagttgaggctggaattatctaaaggctcattggtaggagttcagtgggagagtatctatatgtggtccttccgtgtagcttgggcttctcacagcctcataattgtgttctgaacaacatttcaagagtaattgttccaagagacccaggaggaagccgcaagacttcttaggacctggcttcagaagacttactacataggtaattccagtatattctatttatcaagtgagttgctaagggcagttcagatttaagaggtaggaaataagaccacctcttgatacgaggaacattttgcacatacagggagggaaggaattgatgtggccctgttcagacactatccgtatcttgatttgtcaatgttgggtaataatgttagatagtattttcttgctgtggtggacaagaatttaatgttcatacctctatttgccttcccttcttcctcccaatgtagttagggaatgctagttgtcactcagttccttttaaaactttaagtattcttatttctggtcctatagcaccccttgatacttaattttttctttttttttttttttttgagacagagtctcattctgttgcccaggctggagtgcagtggcactgtcagggctcactgcagccttgacctcccagggccaagcgatctgcctgcctcagcctcctgagtagctgagacattcgccactttacctggctaatttttaaaaattttctatagagatggggtcagcctatgttgcccaggctggtctcaaactgctgggctcaagtgatcctcctgcctcagcctcccaaagtgctaggattacaggcatgattcaccatccctggcctcttgatacttcatttatttatttatttatttattttttattatactttaagttctagggtacatgtgcacaacatgcaggtttgttacatatgtatacatgtgtcatgttggtgtgctgcacccattaactcgtcatttacattaggtatatctcctaatgctgtccgtcccccctccccccaccccatgacaggccccggtgtgtgctgttccccatcctgtgtccaagtgttcttatcggtcacttctcacctatgagtgagaacatgcagtgtttggttttctgtccttgcgatagtttgctcagaatgatggtttccagcttcatccatgtccctacagaggacatgaactcattcttttttatggtgcatagtattccatggtgtatatgtgccacattttcttaatccagtctatcattgacggacatttgggttggttccaagtctttgctattgtgaatagtgccacagtaaacatacgtgtgcgtgtgtctttatagcagcatgaattataatcctttgggttttgacccagtaatgggatggctgggtcaaatggtatttctacttctagatccttgaggaattgccacactgtcttccacaatggttgaactagtttacactcccaccaatggtgtaaaagtgtacctatttctccacatcctctccagcacctgttgtttcctgactttttaatgatcgccattctaactggtgtgagatggtatctcattgtagttttgatttgcatttctctgatggccagtgatgatgagcattttttcacgtgtctgttggctgcatagatgtcttcttttgagaagtatctgttcatatcctttggccactttttgattgggttgtttgattttttcttgtaaatttgtttaagttctttgtagattctggatattagccctttgtcagatgggtagattgcaaaaattttctctcattctgtaggttgcatgttcactgatggagtttcttttgctgtgcagaagctctttagtttaattagatcgcatttgtcacttttggcttttgttgccattgcttttggtgttttagtcatgaagtctttgcccatgcctatgtcctgaatggtattgcctaggttttcttctagagtttttatggttttaggtctaacatttaagtctttaatccatcttgaattaatttttgtttaaggtgtaaggaagggatgcagtttcagctttctacatgtggctagccagttttcccagcaccatttattaaatagggaatcctttccccatttcttgtttttgtcaggtttctcaaagatcagatggttgtagatgtgtggtattattactgaggcccctgctctgttccattggtcaacatctctgttttggtaccagtaccatgctgttttggttactgtagccttgtagtatagtttgaagtcaggtagcatgatgcctccagcattgttcttttggcttaggattgtcttggcaatgcgggctcttttttcattccatatgaactttaaagtagttttttccaattctgtgaagaaagtcattggtagcttgatggggatggcattgaatctataaattaccttgggcagcatggccattttcacgatattgattcttcctacacatgagcatggaatgctcttccatttgtttgtgtcctcttttatttccttgagcagtggtttgtagttctccttgaagaggtccttcacatcccttgtaagttggattcctaggtattttattatctttgtagcaatagtgaatgtgagttcactcatgatttggttctctgtttgtctgttattggtgtataggaatgcttgcgatttttgcacattgattttgtatcctgagactttgctgaagttgcttatcagcttaaggagattttgggctgagacgatggggttttctaaatatacagtcatgttatctgcaaacagggacagtttgacttcttcttttcctaattgaatacgctttatttctttctcctgcctgattgccctggccagaacttccaatactatgttgaataggagtggtgagagagggcatccctgtcttgtgccagttttcaaagggaatgcttccagtttttgcccattcggtatgacattggctgtgggtttgtcacagtttttattattttgagatacatcccatcaatacctagtttattgagagtttttcgcatgaaggctgttgaattttgtcgaaggccttttctgcatctattgagataatcatgtggttttcgtctttggttctgtttatatgatggattatgtttattggtttacgtatgttgaaccagccttgtatcccactgatgaagccaacttgatcatggtggataagcttcttgatgtgctgctggatttggtttgccagtattttattgaggatttttgcatcaatgttcatgaaggatattggtctaaaattctcttttttttgttgtgtctctgccaggctttggtatcaggatgatgctggcctcataaaataagttagagaggattccctctttttctgttgattggaatagtttcagaaggaatggtaccagctcctctttgtacctctggtagaattcggctgtggatccgtctgctcctggactttttttgattggtaggctattaattattgcctcaatttcagagcctgttattggtctattcagggattcaacttcttcctggtttagtcttgggagggtgtatgtgtccaggaatttatccatttcttctagattttctagtttatttgcgtagaggtgtttataggattctctgatggtagtttgcatgtctgtgggatcagtagtgatatcccctttatcattttttattgcatctattggattcttctctcttttcttctttattagtcttgctagcagtctatcaattttgttgatcttttcaagaaaccagctcttggattcattgattttttgaagggtttttgtgtctctatctccttcagttctgctctgatcttagttatttcttgccttctgctagcttttgaagtgtttgctcttgcttttctagttcttttaattgtgatgttagggtgtcaattttagatctttcctgctttctcttgtgggcatttagtgcaataaatttccctctacaccctgctttaaatgtgtcccagagattctggtatgttgtgtctgtgttctcattggtttcaaagaacatctttatttctgccttcatttcgttatgtacccagtagtcattcaggagcaggttgttcagtttccatgtagttgagtggttttgagtgagattcttaatcctgagttctagtttgattgcactgtggtctgagagacagtttgttataatttctgttcttttacatttgctgaggagtgctttacttccaactgtgtggtcaattttggaatagtgcgatgtggtgctgagaagaatgtatattctgttgatttggggtggagagttctgtagatgtctattaggtctgcttgatgcagagctgagttcaattcctggatatcctggtaactttctgtctcgttgatctgtctaatgttgacagtggggtgttaaaagtctcccattattattgtgtgggagtctaagtctctttgtaggtctctaaggacttgctttatgaatctgggtgctcctgtattgggtgcatatatatttaggatagttagctcttcttgttgaattgattcctttaccattatgtaatggccttctttgtctcttttgatctttattggtttaaagtctattttatcagagactaggattgcaacccctgcttttttttgctttccatttgctcggtagatcttcctccatttctttattttgagtgtatgtgtgtctttgcatgtgagatgggtttcctgaatacagcacactgatgggacttgactctttatccaatttgccagtctgtgtcttttaattggctcatttagcacatgtgcatttaaggttaatattgttatgtgtgaatttgatcctgccattatgatgttagctggttattttgcccgctaatcagtacagtttcttcatagcatcgatggtctttacaatttggcatgtttttgcagtggttagtactggttgttcctttccatgtttagtgcttccttcaggagctcttgtaaggcaggcgtggtggtgacagaatgtctcagcatttgcttgtctgtaaaggattttatttctccttcacttatgaagcttagtttagctggatatgaaattctggattgaaagttctttactttaagaatgttgaacattggcccccactctgttctggcttgtagagtttctgccgagagatccgctgttagtctgttgggcttccctttgtgggtaacccaacctttctctctggctgcccttaacattttttccttcatttcagctttggtgaatctgacaattatgtgtcttggagttgctcttctcgaggagtatctttgtggtgttctctgtatttcctgaatttgaatgttggcctgccttgctaggttggggaagttctcctggataataccctgaagagtgttttccaacttggttccattctccccatcactttcaggtataccagtcaaacgtagatttggtctcttcacatagtctcatatttctcagaggcttcgttcatttctttttactcttttttctctaaactcttctcacttcatttcattcatttgatctacaatcactgataccctttcttccacttgatcaaatcggctactgaagcttgtgcatgtgtcatatagttctcgtgccatggttttcagctccattgggtacctgaggtcttctgtatgctgtttattgtagttagccattcgtctactcttttttgcatgtttttagcttttttgcgatgggttcgaacatcctcctttagctcggagaagtttgttattactgatcgtttgaagccttcttctctcaacttgtcaaagttgttctctgtccagctttgttctgctgctggcgaggagctgcgttactttggaggagaataggtgctctgatttttagaattttcagcttttctgctctagtttctccccatctttatggttttatctacctttggtctttgatgatggtgacatacagatggggttttggtgtggatgtcctttctgtttgttagttttccttctaacaggaccttcagctacaggtctgttggagtttgctgtaggtccactccagaccttgtttgcctgagtatcaccagtggaggctgcagaacagcaaatattgcagaatggccaatgttgctgcctgatccttcctctggaagctttgtctcagaggggcacccagccatatgaggtgtcagtcggcccctactgggaggtgcctaccagttaggctactcaggggtcaggggtccacttgaggaggtagtctgtctgttctcagatctcaaactgtgctgggagaaccactactgtcttcaaagctgtcagacagggatgtttaattctgcagaagtttctgctgccttttgttcagctatgccctgcccccagaggtggagtctacagaggcaggcaggcctccttgagctgtggtgggctccacccagttcgagcttccaggccgctttgtttacctactcaagccttagcaatggcggatgcccctcccccagcctcactgccgccttgcagtttgatctcagactgctgtgctagcaatgagcgaggctccgtgggcatgggaccctctgagccaggcgcgggatataatctcctggtgtgctgtttgttaaggctgttggaaaagcgcaatattagggtgggagtgtcccgattttccaggtaccatctgccacagcttcccttggctagtaaagggaattcctgaccccttgtgcttcccaggtgaggcgatgcctcgccctgcttcggctcacactctgtgggctgcacccagtgtctgacaagccccagtgagatgaatgcggtacctcagttggaaatgcagaagtcacccgtcttctgtgtcgctcatactgggagctgtagactggagctggtcctattcggccatcttggaacccccgccacctcttgatacttttaaaaatgaagatattagtgccccaattttttcttctacttctctaactcctactttgcttctcagtttttatcacttgtacttttgtattgctgagaattaaaaatatctactttgtattctgtaatcatagtttttctttgtagtcagttgatctacacatagaaaatcagtaaaatatttattatgattgtattaaaatagttgattgcaggacccagattacattttctgtgtaatttttttggagtttctaattgccttccttttttccccccatcatttgcctttactacatatttgagtagcttcatatcctcaaggatactactccatctctgcaaccgtcttttcccagctcccacatacctgctccaggagtttgctgttctgctgcagtctgaacagattgctgtctgtgctgctgcccagtggcctggggctccctgtcattccaatcttgggctgaagtcactgtttcctcaatcccatgtctttgactttcttgtttattcactcattttgctgcagcatatcctcaaatgatacctaagaaagcgaaggaggtaaactgagtctgttgaaagttctgaagatgtttttattctcagactatctggtggtatcattatctctactggtggcatatggatatgtaataacatttaaccaatgactattgttatgtgtttcagtgtcataggtaactttgagtgaatatccatatatcttctcatttgtgcacatgaataattattttcaaagaataattttgttgagtggaattcttgggcaaatagtatgtgtgtgtgtgtgtgtttttttttttttttcagacaaagtctcgctcttgtcccccagggtggagtgcaatggcgtgatcttggctcactgcaacctccacttcccgggttcaagcgattcccctgcctcagcctcccaagtagttgggattaccggcacctgccaccatgcccggctaatttttgtattttttagtagagacggggtttcaacatgttggcaggctggtctcaaagtcctgacctcaggtgatccacccgcctcggcctcccagagtgctgggattacaggcatgagccactgcgcctggcctagtatatgtatgttttaaggatattgattcattctgccaaaattctcttcagagaaccattgtgtaactggttcttttcatcaagaggctgcttggtttctgttgtttgttttatttttgttttgtgaagactgcagttaacagggatcaggaactctgaaaagggttggctagaagagtctttacctgagcaatgtggaaatgatactgggaaagaaaataaacatatactgtctgtaaatatcagaaggtttatatgaaaaagagattggattcaattaagttttttgggttgtgaggatcagaagtaggacaggcaggtggaaatctgagagagcagtatagttttggaacttttgaatagcagtcccaggttgcagtgagctgcttacacttctcactatggggtagtccaccctaagctgagggcaaactggaagagcttttgtgggtgggatttaaaaatctatgggtaatagaaagtaggtaattttcagaggccatttcaaccatgccacactgtggtatgatgaacataaagtcatcatgaacacagttaagtttaggttggatgaaatatattatagttgtgcaaagtgagatgaaaagctgacaaaaaccataggatcaataaaacagtttagtttacccttagaagtattaattttccttttcatcctggatgcttttctgcaacaagtagaaagtaacaactacttttggagggtgatttgttcacgtaaggttatcttttatagtaaaatagcagtgttcattagtagtgcatccagtccttcctgactgtaatgatctgtctaatcatccattcctccccatcatccaggcctgaaccttagacctgtgtggtcacccttgcatcagtaactaggtgtgaatgattgcacctaggcaggaaggaataggccgttttaggccttgtctttataataagaaaatttaccttgttcagttgtttttttagagacaaagtctcactctgtcacccacgctggagtacagtggtgcagtcatagcttgctatggccttaactcctgagctcaagtgatcctcctgcctcagcctcctgagtagctgggactataggcacacgccaccatgcctggctaattaaaaaaaaaattttttttgtagacgtggggtcttactatgttgaccaggctggcccagaattcctgatctcaagcgatcctcctgcctcaacctcctaaagtgttgggattatatgcatgagccactgtacctagttctttttcctcttttgagtgccttctcttttgagtgccgcatactgatggccatcagtatttttcctgatggccctcagtatgcgtctcattttattctcatgtcagtcttgctataaagatggcattgtgcccattttacaaaaggagaaaccgaaatttagattagctttgccccaagttgccaccagagctaggattcaaatcctgccctccataccacaggcgtattgtcattaactgtctccgcctcccaaaacttaattgcttttaactatccctgcctcccaaaatgtaattgcttaattataataataatttgctcaaatagaggaagttttaaaaagtttgccaataaatatttctggaaattctgtcagcattgggatatagtggtggtatctgttgggaaatgctgagtgttgggagagaagctgaggcagggcttgcatgtctgacataatgtaagagagtcttggaacatgtgcggggtccagggtctaaaaccccttgtggcctttggaacaccaagctctgtgccaaagggtggaaggctaccctgacgcacggtaatctaagcccagggcataaaaccgctcgtggcttggatagaatccaaggctcctggctctggaatgtgtctagacttgctggctccttgctccttgctctcccaggatcgattgtatcttgagttaaaagaacctgctctccattatctcaagtagcagagcatatgctaaaccatcacagctgtaaatcatgtgcttaatgtaacgctccctttcgacccccacattctcaccacctgtttctttgtttgatcaccaataaatagtctgggcttccagagctcagggtctttgcagcctccatacttagtgttggccccctggacccactttctctcgtaaactgtcttttttcattcctttgactccgccagacttcgtcacccccacgacctggtgttgggaccatcaccccaacagtatcaaatggcattcttagacacttccatctatcgttaattttaactctctcgttttatgttttataaagtgatgaggacaatgatggtagtaatggcagccatatagtcctaacaacagccctgtttaaaagtattaaccattcattatagatttcttggaataggatcagaggagttcagtaataggcacaaggttacacagctagtaaggtcagagctataaccctggtttgtctttcttttagactacatcctattgctccttagtttgcaagtgtgctcactgtctgcttctagatgttttacttctgttacaatggtcccacattcccctgcctcttctacttgcttacccacttttaccagccttgcttcactaactctaaatgtatcagtgtttggagattcagacatttttattttctcataacaaatttgataacttctaattctgttccactgatatctttatgagattaaaatctggatggctttctccttttcttttggaatgaaatgtgagtgagctttttttttttttttttttttttttttttaagagacggggtctcactaatgttgccttggctgggctcaaatgatcctcctgcctctgctggcattataggcatgaaccaccacctccagccaaaggctaatattctgataatcctctctcccactcagaaataggcctgaaggactcttgggattttgactttagaggtgatgtgcttgtttaacagcactgagaaggcaaggttcaactcaggaaacatgggccaggcactgtgtaaggctttatggatataacagtgaataaggaacaggaaatgtagatatttgcaaggagctaagtactctcacagataagcagagagatctgcggagccaattgactgggggttctcccagctaagagttaaggggtcaggaaaaacttttctagaggaatgtagcaggtccaccttaagagctgtgcagtctggggtgggtgtttgtaaacctttgctcagcgcagtttctgagaagtagggagctagctccttggggcttatagatcgctggctatttctagactaggaaagcacttctctcactttaacgtaccttggactcacctggagggcctgcaaaacacagctgctgttcccacccctcatggtttcccattcagtatgtcttggatggggccctggaatatgcatatctagcaagttcccaggtcatgctgatgctgcttatctgggaactacacgagaaccattgggctagaagtactagaactaaccattctctttgggaagaggagagaggaattagaagagccaagatgttatgcccaacttttttcaaattcaagagacaatttcctcaaagcatggaaaatttgcattttggccaaagttgtttagatgaacataacatcaaatttaccatttttacactgactcttttaatacttaatgaaaatcatgaagtcaggttttatctgatattaatttggtactttggttaatacttttaattctttaccagtatgaaaggagttggaaaaagtaatcttttaaattctcaaaaaaggtcttaaatatagtatacttcatgattttttttttatttttaaagttaatattaactagagagaaatttttagaatttttttaaagaaacggttttgctgtgtcacctaggctggtatgcagtagtgtgatcacagctcacagccacaccctcaaacttctgggttcacatgatcttcctgccttagccttctgagtagctgagtcagactacaggtgtgcaccattgcgcccagcctaaaatggtttttaaaatttaattaaggcttaggctgttgctgctatagtattttgatattttacatgactttgaggagtctgctttaaaatactttataagttgtataaaaataaattttggtatttgatcttatctttggaaaaactatttatttgaaggatacagtaagaaatttagcaagaattttggctgaccttaggaacacattaactcgtaacattttgcagcagtctggtctgtcatcttctctaaacattgaatgtagttacatagaatgccatagacttagaacaactaaagagaattgttaggaaaaatagatcagaagaaaaatcacctttgacaggagaaagtcagtgttatgaatgagagaaattatccttaaggaataaaaagttcacctataatttttttaatgcttcatgtttattacatacatgaatctgtcttagtgaggggttataataatacaaatcattcttttttttttttttttttgagaagagtctcgctctgtcccccaggctggagtgcagtggcgtgatttcggctcactgcaagctccgcctcccaggttcacgccattctcctgcctcagtctcccgagtagctgggactataggcacccgccaccacgcctggctaattttttgtatttttagtagagacagggtttcactgtattagccaggatggtctcgatctcctgaccttgtgatccgtccactttggcctcccaaagtattgggattacaggtgtgagccactgcgcccagccataatgcaaatctttctaagatgtttatgtctggtgtctggctcaagtaggaatctcattaaaataactttttcctttcatttttttgtcccctcaagagtcatattttagttgtatactgtttccaaagttgtccttttccctaatttgctacagaatttaactatagagatagcaaaaaaacagaacatttctcttattttactttacttgttattttaacttcttcttaaatattccaagcaagtcttttgagaaaactcacctaaactttgaacaagccaccaaattttttcattaaaaaaagcacacaaaatacctaaggagtttgaaatgcaaatggcaatttgttccttattatctttaaagtggttctttatgctgaataaattagagggctcagacatttgtgcttttctcatccccccccttttttttagccgcaaatgtgatttcgaatatgtattaaaatgaattatttatttgttattttaaatttttgtatagagatggggttttgctatgtttgcccaagctggtctcgaacctctaggctcaagtgatcctcttgccttggcctcccagtgtgctgggattacttttgtgagccaccatgcccagcctaaatgcatttataataaaacaaagatgagagtggcctgttcagagctatcctagtcgtaccattttaccactgaaaatcctgcagcccgggaaaccccttcctctgataccaaaaaaaatcacggcagctatgatttgcagttcacaataatggatcatccactgatgcaacttaagtgtgttgtaattgtgagcagtaacagtctatcattgacattgcccgttggattaactgttttgatttgtattgacatagtgttagtttaacctaccacactgtgaatactgtgactgtattttctgagagttcagataatgaaaatgagaacagttatgatatcaacaccagagtgtcccagacatcactgagaaggaaagttattattgtatatggaaatctatgttattttatatatattagtatataatgatatgttatagacagagggaaagacacataaaatttaattagggagataaaacagaacatattgcacaataggcaggaaagaatttgggattgggcattgttacagtttgaattgtgtcccctccaaaattcataggttgaagtcataactcccagtaccttagaatgtaacctcagttggaaatagggtcattgtagatgtagttagttaagatgagtttgtattaaaatatggtgggcccctaatccactatgactggtctccttgtgaaaaggggaaatttggacagacatgcacacagggataatgccacgtggagactggagttaggctgccacaagccaaggaactgcaggaagctggcagagagtcctagaacagattcttccctagttgcctgcagagagctcatgaccctgttaaacccttgatcttggacttctagcttccgtaactgtgagacaatacatttctgttgcttaaaccacccactttttggtactttgttatgacagcgctaacaaactaatacaggcttggtgaaggagatgtgtaagcacctaaggagactgtgtctctcaagtctgggataagacaggcaagcacatctaaattaatctgcacttcttccatcttgtttaaataaaagcatttagtataacagaaaactagtatagaataataatttcaaataaatacctattcttcatatttgtgtgttaaagtaataaaacctgtgcataattctttctcctccattgttatgtctctggactggtatggctgtgccctagttgactctctgaaaagttggtcaccccctgtgcattcaatgctcctcttgcctgctgttgctgtgtctttggccatccctccttccttcttcctcatcacaaattccagtattgctaaggataatgaatttgtgattataaaaagttttagattaaccttgttaaaggtagttcttataatctagcttagaattttgaatccctaaaataattttcacgaataaatactaaaaatcatcaaataaaaagtccacctattatttttttaatgcttcatattgttctcatttggaaggcagcatggtatagccagtagaaaaatagtttccaaacttttgtttacatctaatgtattggggtagggaggactgttttctttggcatgtaatcataattctgatttaattggaagtgctggagtgactccatttacttagtagcaatttttaaagtatattaagtaaaatttttagaatgtatacttttggttttccttccaatgtttactaactctactaaacttttcatattatttaattggtagaatgtactaggtattatgtttaaatttagaaaggtctcaaagatcctaaatttagctccaggatcttctgattcacaaatatatttttcagaacaaacatggtggcatgtgttgtcatactgggcaaatatacctgtactcacaggcttatgtattgttattgaggataagtgcttttttgagatttttaaggtgcttccagttagtaatggatataaagtgagttactatcaggtgttaaattgttataaaactcctcatcttctgaaattcacagtactttgtgatcattctttttttttttttgagacggagtctcgctctgtcgcccaggctggagtgcagtggtgcgacctcggctcactgcaagctccgcctcccgggttcacgccattctcctgcctcagcctcccgagtagctgggactacaggcgcgtgccacgtgatcattcttttctacagtaatttgaaaatgccattactaatggttatttagagttcatttgtttaacgtgacacaactgcttgaagcctattttcattaagtggacactgtatacataagtgaacataagtgtataatttactgttttttaaaaatactgtagaattccaaggatctttctatattctcacgaagaaaatcagtttaacagtaaaaggtagaaaacttcttgatctgttttggtattgattgttatattatgctgagaagctattggatatttctacggtatttgggaattttgttaagaatgttatccttgacgttgtgttttatgtttatcattcagaaaaatggagtgctggcatacattgggaattttcgcctgcttgcagagctttccagcccgtttgtgaatcagcggtatgttactgatatcattgattattttaaagtcatgctgtttatttttagtttgggcaaatccttttcccgtgatcctcaagttactatataaaagatacggatctgtgatatgaattgttatcaccatcatacaaatgaggaaagtgagttttggaaaggttagagtaacttacccaagtttccctagctagcaagtggtggtgctagcttttaaatcctgctctttgcagtacgatggtgctttatgatgcctgcttccagctcattctttcaccctccacgttgtacactgcaagatgaatggtattcactgaatcttagatttgagtggggctctttatggaaaaggacaaatatcactgtggctcattttgagtctagctcatattcctgacactaacttcctcctgtccccaaattcttatattgacattatcttagtgcctcattgaaatacataatctttttattttttaaatttaaaaggctacttttagctgggctcaggggctcacgtctataaatcccagcactttgggaggttgaggcaggaggattgcttgaggccaggagtttgagaccagcctgggtaacattgtgagatcccatccctacaaaaaaaaaaaaaaaaaaagaaaaaagaaaattagctgggcacgatggtgcttgcctgtagttctagctgtttgggaggctaaggcggaaggattgcatgagtccaagagtttaagcagtgtgtccagtgagctgagatccagcctgggcaaaacagagaaaccctgtctgtaaaaaatttattttttttaaaagactacttttattttaaatacatacaatgtaaataactaaactaacaatttgtaatattgatagtcatcactagtgaattattattatttttgagatggagtctcgctttgttgcccaggctagagtgcaatggcgccatctctgctcactgcaacctccacctcctaggttcaggtgattctcctgcctcagcctcccaagtagcagggattacaggtgcccaccaccatgcctggctaatttttgtatttttagtagaaacgagatttcgccatgttggccaggctggtctcaaactcctgacctcaattgatccacccgctttggcctcctgaagtgctggggttacaggcatgagccactgcgcctggcccatctcaaccatttttaagaatacagttcagttgtgttaagtatattcacattattgtgcaacagaccgttagaactttttcattttgcaaaattgaaactctacgcccattaaacactaatttcgctctcctgcaagtcctagacaaccacctttctactttctgtttctatgattttgactaaataattcatatgaatggaatgatacagtgtttatccttttgtgcctggcttattttgcttactataatgtccttgaaatgcatcatgttgtagcatatgacaggattttcttctttttaaaggctgcataatattcctgttgtatgtgtaacacattttccttatgcattcatccgtccatggacattgagattacttgcacccctggctattgtgaataatgctgaaatggacatgggcatacaaatatatttttgagaccctgtttcaaattcttttggatatatttctagaagtgggattgctggatcatatgatggtccttttaattttttgatgaaccttcagacagttttccataatgcatacatctttttacattcccactaacagtgcacaagggttctgatttcttcacatcctcatcaacacttgctgttttctgttcttctgatagtagccattctaatgggtggaggtggtatgtcatgtgtttttctttttctttttcttttcttttctttttttttttggatacagggtctcactctggttcccaggctggagtgcagtggcatgatcttggctcactgcagccttgacctctcaggctcaaaggatcctcccacctcagctttctaagtagctggggctataggcatgtgccaccacacctggctaatttttgtattttttgtagagaaggagtttcaccatgttgcccaggctggtctccaactcctgggctcaagcgatcctcccactttggcctcccaaaattctgggattacaggtttgagccaccgtgcctggctggtcatgcggttttgatctacattttactttgattcatggtgtggagcatcttttcatgcatttcttggccatttgtatatctttaaagaattgcctgttcaagttctttgccaattttttcctttttttttttttgatgcagttttgctccgtcgcccagtctggagtacagtggcgtgatcttggctcactgcaacctctacctcctgggttccagtgattcttgtgcctcagtctcttgagtagctagaattacaggcatacaccaccatgcccagctaattttgtatttttcgtagaaatggggttttgccatgttggccaggctggtctcgaactcttgacctcaagtaatcctcccacctcggcctcccaaagtactgggattacaggcatgagccactgagccaagccctttgcccatttttaaattgggttatttattttgttgtagtggtactgaatattgatactttatcaaatacatgatttggaaatattttcatctattccataggttgctttttcactctgctgattgtttcctttgatgtgcagaagattttaaagttgatgaagtcccatttgtcagttttcgtttttgttgcctgtgcttttggtatcatatccaaaaaatcattgccaagtctaatatcctgaagccttccccctatatttctttctaggagttttatagtttgggcttatgtgtaggtctttaattcattttgaattaatttttatatatggtataggggtccaacttcattcttagaatgtggatatgtagtttttccagcacatttgttcaagagactatcttttccccattgtgtagtcttggtacccttgtcaagtcatttggctgtacatgcaagggtttaatttctacagtagcttctaactgacttcctaattccagatacaccttctctcagtcctttcctcacagtgttaccagaatcatctttcttacattccactttcactaccttattttttcactaaaagctgcatcctgtttacacttctctctctgacttctgaagttctctgtgatgtgctccatatgccttcagcctcttttttaaaattattcattagaatcagttttctatccttactgtcttatgttcctttgggtttttctcatatttcttcctttattcatatcctctgttttctccccatctttgaaaaatttacttatcctttaagtcttagtcaaaatctaaaacccggggaaggcttctatgattatatgtcttgttatttagtacaggggtaacacagtaagttgggagtattccacatcagagacacataagttagagcacttaccctgaatgaagcctcatgaataatttcaaagatactggccattggaggcacaagcaaagcaggaagatgttcaggacaattgacagggctccctagttctgtgtgcctagggtatactctggaacaagattacttgtgaggtctctttttaaaaataattttattttttattaaaatttttgtttaaccgctagaccacctgggaacctgtgaggtctctaagtgatgtatgcagttcatattatttacatagaaggagctctcttggtgataaaacacctccagttaatcttgagttacatagcttatatgacattctcaagggggtcagatctcataaatccattaattcctgggtcacttaccataagcaatcctagactaagtatgttcttctaaaagcatcccatagatgaagcctctcttgctacaaattttattagtctctttatcaagaggtttggcattagtgtgtttaccaggtgattagcctggatcaactgtctttttttcttttctttttttttttttttgtttttttttgttttttggagatagagtctcgctccatcgtccaggctagagtgcagtggcgtgatcttggctcactgcaacctacacctcccgggttcaggcaattctcctgcctcagcttcccgagtagctgggacttcaggcgcatgctgccacacccggctttttgtattttagtagagatggagtttcacagtgttgcccaggctggtcttgaactcctgagctcaggcaatctgcccacctcggcctcccaaagtgctaggattacaggtgtgagccactgcacccggcctctttttaatttttattatttatttgtttttgagatggagtcttactctgtcaccctggctgaagtacggtagtgtgatcttggctcactgcaaccccaacctcccaggttcaaacggttctcctgcctcagcctcctgagtagctgggattacaggcattcgctgccatctcacctggctaatttttgtatttttaatagagacggggtttggccacgttggccaggctggtctcgaactcctgacctcaggtgatccacccacctcggcctcccaaaatgctgggattacaggcgtgagccaccatgcccagccctttttttttttttttttttttttgagacagtctcactaatattctccctgcttctctctgggtgacttctttcctcccaaggtgtcagctcttaactatttactcatattggtgtaagggactatgccttagttttggaatcggataaactcaagttgcaatgaccttggacaagttacttaatattcctgtattatagtcattttatctatgaaaagaacatatttaatattacctatttctttgtattatagtcaagtgttttgttctcttaggtggcacgttgaatcaacatgtgtaaagtaacacaacatatttccctctatactcagtgcatggcccagctgtccacttggttactgctgctcaacatgggtgaagtgtttttgactatttctccctcactttatttgatccagcattaggttctaccatatcacctcctaatatttctcacctttaccacctcttctctgtctctaccttcagtgccctagttcaccatctcttgctggctaccttaccagtttctaactctgtactgtttggtagggtaaccacaagccacatatgaatatttacatttaaatcatttaaaggaaataaaattaaaaattcaattccttagtctaacttttggcatttctagtgctttatggctccatgtggccatacacggaacctacagctatgtgtgagcaacatacctttagtagaacatttttattattgtggaaagttcttttggtcagtggggctctaggccaggttggcaaaccatgcatggctcatgggccagacccgctgcctgtttttgtaaacaaagttatactggagcacagccatgttcacttttctgccatgattgctttaactctaccatggcagaattgcatagttctgacagagaacagatggccaccaacagctactgctttaatgttcactatttggctctttatggaaatagttttccagcccttgtcatagaccatctcctgtctcctatcctgttcccctttcatctctcttctatattattatctttcacaataaagaaatatatggctttgtaggagcctacaacatagcttaagaagaaaaaaatatgtagcttccttggttaaaacctctcagtggctctggctgcttacaggataaaatatgagctcttcagtgtgacacagaaagctctgcaagaagagctgtcttatctccttctgccacatggcccctcaaaccctcatctcacaccagcttgtccatctactggcaatgcctcctgtcttacttgttatttagaactcaacccagggataatttccatcactaaaacccatctctttccaggctgaattgggtgcctcttacatatcctttcacaatagcaacatatgtgtatattactatacttaatgtattttattgcaaagttctctcttttttatgtttcctatttatctttacatttcattagatcaagggccaaattttgttaaactttgcatggtccagtgtccacacattatctggcatgtagtagccatttgattgctttttgaatgaatgactcccaagaggtgataagttaagctttagctaattctgtctcttgaatatgattctgattatgagattttgaagcaggataaagctacctttgacactaataggcacctccatttgtttttgtttgaaactcttttagagaaattataaaattagagatagtttaattttatagttttataataaaaacttatactgtacctttatctaaaagctttgaatccttcctgttaagaaaatgagaactggcgttagaatatgaataagaaatggcatcattgggcagtaaggagattgtaacaatattgagcacagcttctgtcagagtttccatagtttagttgttttcttttttagtttgagatatttttattttctctccattttagagctttgtatataagaaggcacatggcatacatgtgctggggtacagagtgaaaaaatactgaattagtttagacacctgggcttcagtgaaatttctgctgctgagttatgcccacacgcaggtttcttttatataaagtaatttaatggtgctaatttctttcttgcctaaatgctcttaattgtttttgaggacatattttatgaattgatattgaaattgaataccttgtaaaagctttgcacctgtgtttcttaatatgttcattcaatatttattaaatacctcttcagtacctaaatgtcccattctgtgacttcaaggagctttagatatagcgtctggcttcatgtctgtgtttgagaaaatagtacctaaaaatataaaatacaattttttcttttttctactaaaaacacaaaaattagctgggcgtggtggcacatgcctgtagtcccaactactcgggatgctgaggcagtagaattacttgaacccagttggtggaggttgcagtgagccgagatcacgctactgtactccagcctgggtgatagagtgagactctgtctcagaaaaaaacaaaaaattattacctcattgaatattaacagtaatgttccatgttaacacaatatttgtgtgtgtatgaaaaataactgcattgccaaaacaaaccaaaaaaaaaaacagtaggaacagtgtcattgttttacatttttgcaaatctctttaatatctggaatgatagaattcagctggattctcagatgggcttctgttttcagtctgttgtgataagtagtgtttgaagcatatgaaaaatatctagcctctcagagttaattatgcaatagaaaaaaagtattttagtggccttttcaaatactaataattgtggatattccttaatatgtcatcaaaatataccaagaggtagtttcttaaagggtaagtaaatgtgaaatctgaaaccatatcaatgaacttttcatactctgttatattcaaattcattggcctttcttgggctttaacctgttttaaatttgtttaattatttatttatttatttatttatttttttttttgagatggagtctcgcattgtcacctgggctggagtgccgtggtgcgatcttggctcactgcaacctccacctcccaggttcaagcaattctcctgcctcagcctccctgagtagctgggattactactactccctgagtagctgggattactatgccaccacgcccggctaattttttgtatgtttagtacagactgggtttcactatgttggccaggctggtcttgaactcctgacctcgtgatccacccgcctcggcctccccaagtgctgggattacaggtgtgagccaccgcacctggcaggccttcaatcttttacatatgcataattttgattcatcatgtcttggtcattgggaaaatattggctcactgagttatgtaggtcttctaaatgttgaacatttattagatgacatttaaaatatcaccgcagatctcattagaaaagtctttaagtattgagaggctgtcaagctcacagttgcagataacaaattttccaatattctgattttcatttgaaagttcagattttgttgttggtatcaaaactgtcagttgcttttctttatgtgacaagcccactttttttttttatttttgagagagtgcctgccagatggctcaagcaatcatagtttattgttttttgttttttttttcaagtaaaaatggcagtctgtggaagaacctggtagtttagcttacaatttaaaccatcagttgagggtttttcctcaagaaaaccattttactttgtagcagaaatgccttatgtgtacttcccattttatcatacagaatattaaaaagacacatactcagaagtcatctaataaaaataataaataattcttactgcttcattaagggcatttctaactgaaacttttcttttttctggttttgtttttaactgcaagcaagcatgtggtgggaaaggatacagtggctactaataccatttctttatttgtgctaagatgccaacagttttatttactagcactttacactatcagtatagaagtcagcacaatgaaaaaggcaaataatgttttaatactattattaaaataattatatcttgaagacctcccaaaaaggactcaggggtccataaaccacattttaagacctatcattgattgatacttgtcacgtaaggcttcacagagaacgtggcatacactcttaaaatgttttaggacttttttttttaagaagtggatggagagggaagggccttcattcaagaagaaaagaatcaacataggattttgaaaagtgaaataaacatgctatgggaaagagaaagtataggatcaaagagtatgtcttaggggtagggtggatagatgtagaggatgttgagtgtctgggagagctgattgaacttgacccagtagacagtgagattatagtggagaaagacattctggaaagagcactgagtggttataacttttgatatttgtaggatagattgtaacactggagacaaaagtttgggttaggttacccagttcttagttgtgtgaatggacagtgtaattttattagttccgaaagtaaataagagtccatattaagctgtgggactagagagatgacaaaatagagattttgaagaaatgaaatgaaattggcaatgaacggataaaaaattagagaatacggacaagtttaagacaaatcctatattggacccagagaaatgtgcccatcaaaagtgacagagaattaggaagactgagagggaaggtgacgaatttagtgcggagatattggataagaggacaaacagagcatctgagtggaaatttagtgagagctcgagagaggaatgttgggatgatcagaataaggtgatattttaacctgtgagaaaagatatatttagaagattagagttaaatgtttaagactggaaaatcagccaggtgtggtggctcacgcctgtaatcccagcattttgggaggccgaggcgagcagatcacaaggtcaggaggagatcgagaccattctggccaacatggtgaaaccccgtctctactaaaagtacaaaaaagaattagctgggtgtggtggcgcgtagtcccggctactcaggaggctgaggcaggagaatcgcttgaatctgggaggcggagattgcagtgagccgagatcgcaccactgcactccagcctggcgacagagcaagactgtctcaaaaaacaacaacataaaaaacaaaaacaaaaaaaacaaaaaaacaagattggagaatcagagaaagaagagtagatataatgaaggaataatttaggagtagtaggggaaccaaaataatatgaagctggagggaaacttgtctaaaattcagttcttaaattcctaaccttccagggttaatgtttattaaatacaaatgtttacatgcctgaagaaattacatttgcaactaagatgtaagtagagtcagcttacagcccagtcccttcacagagttccagaaacagtacagcatccaaatccttattggagtttttccaaggatgtcaacaaagatccagtttgttactcacaacagcacttcttaaaattctcttcattcctcttggactcacaatatcttgaccccacagctttcctaaggctctctcaaacttctgactctcaactcctctaaaactcaacaaaccagtgccatcaaggatcaattatttgtccctgtcctcttttctcactttttttttttctgtgcctgcaaatagccctccatcctctttccaaatgtaaatgtgaattagagcaaataattcctagtttttacactttttctagtttttacacaatttttagtgagtacgatacctctacacaattaactcccagtaaacttaatgggaaggttcaagttcctttagaagggtaggaggaggaataattgctaaatgaccaaagttaggattttctctctggagtgaagggaggattgtattaataaatacatacaatttgctgtcttttatgcctgtcttagtaataacagtaaatggtgggtaaaagaaagtgttgctgttcttctttccttccttcccacatgcatgttttcctcccttcccctctttcctctcagattcagtacataccttcacaaactgttagtctttatttgctagaatgaaagaatgttctaattaggtaagaagaggtggattccaacaaaataagtgatctttctgccatggaagagggaggtaaggaggacagttatgtaaatattatttcaccttgagttaatatttgggttctttcctttgaaagaaactggtttaaagaccaggcactggttagatggaaaaattggcagaagctaacactatggttatgaggaagctatgggtgaccaatttctttttttttttctttttttttaaattatactttaagttttagggtacatgtgcacatatgtaactgactaatttcttttgtagagttgcagtcatatcgtcttgggtttgggagtgtagtaagaatgtctgtgaatatgtctgactctcctttcaaaaaactggcaaagaagagaagcagtggaggggaggtttttggattagcaggaattgagcacgttggtaaaagaagaatcaatttatagaaggggaacttggtagaacaagggaaggcagggtagtttattgaataaatcctagaagatgaggactctcctctgagttgaaaggtaaaggtgcctgagaagaagttttgagatcttggggtcagagtggaaggaattcatggttgatggactctaatgcagttgactcccgaacaacatgggtttgaactgtatgagtccactgacacatctatttttttcaataaaatttgcactaagtgtgcctgcctttccttccaacttcgtcacctcttccacctctgccacctttgcgacagcaagtccaactccttctcttactcaaggctagttaacgtgaagacgacgagaatgaagacctttacaaagatccactttcacttaatagtacatatattttcttttctttatgattttcttttctctagaaaataacgtttttctctagctttattataagaatatagtatataatgcaaataacataaaataatgttaattgactttatgttattggtaaggcttctggtcaacaatcaggtgtttgggcaagtcagaagtcaagcaattttcaactgtgtggggagtcagcacccctaaccctggtgttgctcaagaattaactgtatatcagtaagaaaccagatgctctgatgggattgagagacaaaagtgaatgaggaagggaattgacttgaatggcaggacaggtttggaagcaattatatgggaactatggagtgaaatgaaaggactgtcgagccagtttgagaattctgctgaagttcaaatcttttaaaattatatttgtgccatttatcttaataaagattggtgggtaatgatatttattgaatttacagtatgggggagttgttactctgtgtcatggcagcttcatagtacaaaggaggtactatcatttatccccatttatagagatagaacaaacatagaggtgaatagcagagagagctaagaccacacagttgctccatggcagaaccaggctttcaacccaggcggcctgactgcagagcaccctagctactcttcacgtcattctgtattgcctaaggaaagctggcttgatgaaacactggagatcagcagagtgggtgagatagatgaagtggcaagagaacggagggtgctgatgtgtgttctgaagttaacttggagtttggattaggtaggaaaggaagtgaaagcgtggaggctgatagagagagatttgaggatttgaaggtcaaagaagtagtttaggtgagattgggtaaagagaaatatggaaggcttatgattagagaggaatgggttcactgaggtataatatttcttgagtaattccaaggctgccatgtagtcaaagaaatgaatggctgaaggagaagggaagtctttggagaagagaaggcttgaggatcagagacctggattagaatgtggatgtcattgctttagtgatgtttttcctatttgcagtattatttcattaatttagccattgctatctaaatagtctttcttaattgtcttagataatttagcccttttatcctacataaacttataaaatgtaatacatctctcatcctatataaattatttgatattttaatcactcaataaaatattttcaagctttttaactattaatttttagtttcttatgttgaacaattttagcttaatcatgactaattcagttaaattgaatattaagatacacagatatgttttactgcctttgcaatttgatctctaaaatgatgtaaaattaggcaaggcagtttttttaaggaagaaaaagtggaatagagcgaatgttcactgactttttaaaaacctttttatctttagaatagttttacatttacagaaaaatcagaaggctgatacagagggtccctgtgtaccccacacccagcttcccctattgttagcgtcatagatcagtgggtgcagttgttaacaattagcgagccagtgttaatatcttattgttaactaaagtccatactttgtgtggatttctttcgtttttgcccagtgccccttttctgtctcaggatcccttccagaatgccacactacatttagtttcatgtctgcttaggctactgttggctgtgatcgtttctcagatgtcctgtctctggtgaccttgacggttttgaggagtactgatcaggtgttttgtagactgtccctcaatttgggtttgtctgatgtttttctcatgattacactggggatatggggtttggggaggaagaccaccgagggacagtatcattctcatcacacatattaggactgcatgctgtgaacatgacttaatcattgttgatgttaagcttgttcacctgaggtactgtttgtccggtttctccattttaaagttattccttacacctgccctccccctgccccttccatactgtacactttggaaggaagtcactgtgtgtattagtttgttggggactgccataaaaaatgccacagtctgggtggcttaaataacagaaatgtgtttttgcacagtgctggaagccggatgtccaagaccaaggtgcctgcagggttggttcttggtgaggcgcctctcctcttcttgcaggaggcaacttctctctgtgtcctcacatggcctcttctccgtgtgtgcatggaggaagagggagaactttggtctctcctttcttttaagggcactggtcctattggattggagcctgacccttgttactttatttaaccttaattgccttcttaaaggacctatcttgaaatacagtcactttggggctttagggcttcaacataagaatttagccgggcgcggtagctcacgcctgtaatcccagcactttgggaggccgaggcgggtggatcacaaggtcaggagatcaagaccatcctggctaacacggtgaaaccccgtctctactacaaaatacaaaaaattagccgggcatggtggcgggcgcctgtagtcccagctactcgggaggctgaggcaggagaatggcgtgatcccgggaggcggagcttgcagtgagccaagatcgcgccactgtactccagcctgggcgacagagcgagactccgtctcagaaaaaaaaaaaaaaaaaaaagaatttagtgggaaacagttcaatacattacactatacacagcccacacttgaggactaggggtttatgctttaccttgttgaaggtgtgatttctacataaattatttgcagttattcggaacagatttgtttcttctcccctattcattcattcattcatttatatcagtattgatttctggatatttattttatactttaggttataatccaatacaacattatttattttgttgctcacattgtgagttttggacctggagagctcatttggttggtttctgtgttcctttgacataaagaaacgtcattttgttttttgagcactttcttgctctctggccctaaatgatactctaacaggttcatattgtatattgtgtattctctgttcccagccctcaaatcaggtatttctcaaggaaccctagtttctttcattggagagtggtattagaagccaacacgtggatgccatgtatgctcattgttactgaggcatcattgtttctatgggctcctagctgacagaacctggaaatatgctgacctgtgtgtatacacctatctataattatttctgtatgtatgcatttatagctatatcaagctaaaatagttcactgtttccaaatctaatccagtatctcatggaaaaaatctagccgcctcttgcttgtctgaaacctttctatccaacaatgagaaacctggttcccactatttttcatcaaacaaatccatttatttgttcagtcctgatatacatgtataatggtttcagaattgttaattgtttttgcgtgaactagagtacattgcctgtatacagtttcttttgcctttgtcttatagtctccatctttgaagtcacttaggtcagcacctctttctaccttactcctttcagggatgttatatcatgcatttgtaacagttaagattcttttgtcactgtttgcattgcatcctggtatcccccaacctcctaattgattgtttaaaattttgcatacatcaggttcactttttgtgcacttctgtgggttttgataagtgcataatgtcatgtatccaccactatagtattatgcagaacagtttcaccaccctaaaatatcccttgttttacctactcaatccccttccactctttccgaaactctggtaaccactattctgttttctgtcttgatacttttgctttttctagaatgtctataaatggaatcatacagtgtacaggattttcagactgatttcatttacttagcactttagattcattcttgctgttacattgatagtttatttttattgctaagtagtattccaatgtatggatgtactacaatgtttgtccatcttgatggcttgtagttgttggcagttatgaataaagctggtgtaaacacgtatgcagcttttgtgtggacatacattttttaatcagttggaaaaatacctaggaatgtgattgctggtttgtgtgctatgaatatgtttagttttatgcctgctaaactgtcttctaaagtggttgtaccattttgcattcctagcagcaatgaatgtgtgttcctcttgttccacacccttgccagcaattgttattgtccattttttgggattttagctattttaataggtgtgcatagtatcttgttgctaaaatttgcactttcttttttttttttttctttttttttgagacagagtctcactcttgttgcctaggctggagtgcaatagcacgatttcggctcactgcaacctctgcctcccaggttcaagagattctcctgcctcagcctcccaagtagctgggattacaagaatgcgccaccacacccagataattttgtatttttagtagagatggggtttcgccattttggccacattggtttcttttcttttcttttcttttcttttttgagatggaatcttgctctgtcgcccaggctggagtgtggtggtgtgatctcggctcattgcaacctctgcctcctgggttcaagcaattctctgcctcagcctctgagtagctgggattacaggtgcccgccgccatgcctggctaatttttgtatttttagtagagacggggtttcactatcttggccaggctggtcttgaactcctgacctgatgatccacgctcctcagcctcccaaagtgctgggattacaggggtgagccactgcgcctggctggccaggctggtttcaaacccctgacctcaggtgatccacctgcctcagcctcccaaagtgctgggattacaggcgtgagccactgcaatttgcacttcctaatgacaatagtgaacatctttttatatgcttagttttcatctatatatattttctgatgaggtttttgttatgctcttttaccagtgttttaattgggttgttttcttattgttgacttttaagaattctttgtgtactttgtatacatgtactttaccatacatgtatattttaaatattttttcctagtgtgtggttgtcttttctttaacagtgtctttcgcagagcaagttttaattttaacgaagtccaacttaactaactttttcttccatggatgacacttttggtgttgtatctaaaatagcaccaccagatgcaagatcatacaggtttttttccttttttcttatggaagttttatagttttgcattttacatttaggtctatgatccattttgagttaatttttgtgtaaggtgtgagatctctgcttaacttcatttttctcgatgttgatatacaattttgcacaccttgttgaaaagactttttttctccactgaattacctttatgcttttgtcacaaatcagttgagtatatttgtgtgggtctatttctgagctctcttttctcttccattggtttattgatctttcactaacaccatgctgacttgattactgtcgctttatagttaagtcttggaaatgggtagtgtgagtcctccaactttgttctttttcagcattgcgtatgctattctaggccctttgctcctccttcactgaattttaaaatttaaaaactaaaataaaaatggttaatcctcagagatgcactataaatgtgatgtttctttaattcatttttcaggtggttctttgaagctctgaagtatcccaagttttctaaagctatcgttatcaatggaatactcatgacagtagtattcttcatcgtgcggattgcctcaatgcttcctcattatggcttcatgtattccgtgtatggaacagaaccctacataaggcttggagttttaatccagttatcctgggtcattagttgtgttgttttggatgtgatgaatgtcatgtggatgatcaaaatttcaaaaggttgcatcaaagtcatctctcacatcagacaagagaaagccaaaaatagtcttcagaatggaaaacttgattaaaagagtgctaccgataagcaaacttcattactacccagcatatctgctgataggatgaattcttggcatgttcttgtgtacctttcttaattataattgttattcaggatttcagtgtcattttttttaaaccttagaaaagagaaggccgggcacggtggctcatgcctgtaatcccagcactttgggaggccaaggtgggtcgatcactgaggtcaggagttcgagactagcttggccaacatggtgaaacctcatctctactaaaaatacaaaaaaaagtagctgggcgtggtggttggcgcctgtaatcccagctactcgggaggctgaggcaggagaatcgcttgaacccgagagacggaggttgcagtgagctgatattgtgccactgcactccagcctgggcgacagagcaagactctgtctcaaaaaaaaaaaaaagagagaaactaaaattaaaatttagttttcatcccaagatgtcttttctgcctttcttttgccttatttacaagcatggataaaaatcttaaaggtttaaataaaaatgatcaatataatggtgaatcttttgagaaatctcttaactgcattggtattttttctctgtgaaagatgactatgataatctggtacaaatggttttatgtcaccaattttgctgcaagaatgggaactgcttttaaatctgtaaatagctcttaacatttgttgtatgcactcttttcttactatggctgtcaacacttgtgtagggtttaatttctaaattgttggcatgttctttttctcaggctattcagaagtaacaacatttttcatttcagacatgcaatcacctattaatgatgaaatattttaccactttgggaatatttaattagtttagtcatggagaatacttcccacattttaagattttttcaaatatcactgtcatttctattttagcattttatcaaattattgcttttttattttataataaggcttaagacagattatagacctccttaagagatgagtttcttcttctaaaaatgcatgttgatagaggactatttaggctaatcggaggaatcattaagaaagaaagttttaacactgtttatccctatctgctttccttgcactttttctgtgaaaaatattttctgtttgcaaaatcttccctgagttctgaacccagcaccatcagtaccaaagtcttatgcaatatgtatttattatgctcctgaaataggcctcttcttgatgagacccaaactattacaaaaatatcagtattcatattttactcacaattcatacccgtgcttacttagttggcattttagtgctttgaatttctatcttaaagcacagaaaaaaaaaggtaatttaatccaagtattctatcatcaaaattattgtctgattatatgaagataaatgactggcgactctggttgtgtgtgtatgtgttttgcttttactttaattcttgcaatccaaatatagaattatatatttatctattattgcctttattctttaagcacttgagtttaatgattattcttacctgagaaaggaagaaatttaattctaccagtgatgaatacttgaaattaattgaactcataccaaaagatgtaatccagtttctcagtttgaaggagaacgtttgactcactttcattgttcatgctagctgaatataatcaagacttttgatttgatttgcttttattattcaatgcagatagagcctgataagttttagaacatttaaagaagattgaaatctcagtcagtaactaaatgataaaatgagattgattggcttatactaggtacatttatttttgaaagaattaatgtaaaataatagttatttttaaagcagctaatattacactgataatttgttgctaaatttagtgctgtccacatcataggtgcttaaatatgtactggttaactagaggggggtaggaaagcaagcggttttatcttgttcttacctttttgcaggaaaagtggctttaaaaaaatttatataataaaactattttggaaattcattcttttagaaagagaccttgagataaatattttttgactctggatatttctatagttctgaacacagattttaaacccactatcaaaatgaaaacaatataaagctatattagtgagtctccatgtagcagtttgtttttatagttactgtttcatgcttaaaacttcattcttactttcattaatgttacccttcactggtatagccactcactaaataagtatatttaaaacatcaaaattttgaactaaagtttgtgattctcttattcagcaatccttatcttatgctggctgcatgagttaattcaacatccagattaaatatcctgaagtaggttctatatatttcctcatacaacagacatggaatggaaatgccactagaaactgccctgctacttttaagtctgacctttgcaggaggtacactttgctgttctatgattgtattcacctacctaaaatacaaatgaagacagaacatatcatttactgcacgatgaatttttcatttattaaatgaaaaacgtttgctagacattttaaatattaagtattttgactacacggattaatttaaatgattctatcaggcattctgatatttaacaactctattaaaatatttatagaaaaataaaagcaaattgatataaatttttgagcaattctatttttgtagaaaaaagataacctgtaattataaagatgttttttgaatgtgtagtatcctagaaaataaaagttcttgtgaaacttaaaaaatgaatgaaaaccaactaatagcatgcaagatcatagatcctgcattaaatttttatttgtgaaaatttgaaaattatgagctataacttataaagtttgccttcttatgtctaaaatcttttaaaggattatttgcatttatgtaaaactggaaatgaagttatatatgagtgcaaagaaattgacttctgctcaaatatgtgttgataccctacagtaaattgaattaaatttttatcccaactgtttgattttattatttcatggactagccttacgttaagtgaaatactatttatgttgttaccacccctaagagtgactctgatatattatggatgacccaggacggtcttaaaggtctagttttaaaaactgcctagtttgtaagtatttgaatccagttcttttctaaattttaataatttgactcaaaatttttgctacagggtcaacttttaaattgtatatttcctctgaggcacactgggcatttggagaatggttcttcactggtgtagagagccaggtttactgttggttgcaccatctgttatcaggcatgcagaaacatttttcttctggagaaacagaggggaaggtgttgttacagtgtacatgtttcctctgtgtcgtttttaagggaaataaacatgttccaaaagatgctgttaaaataaatatttgaacacgttttctgtttctaggttgctcttaattccaaacatttaaataaatgtgcatttgaatagctttaggtggtttagtctattagctgaaatggaaaagttcatgtattgacatcatcaataatacttcataaaggtttatgtatttttatgtgtttggattccataagaagttgaacttagataattttatcaagagtagcacagtgtttctcaggtgcgagccagcatacagcgagacccttcatgtgtctctggatgcacatatatcttcccaaccttaaacacagctcattgaaatacattaaagctactgaaagtgagttctgatgcaaaacacatgtgaggtgtgtaggaacaatgaaaagctagaggatctggagttagaggaggcattgagagtgcttttcccttaaacgccgtgatagtcctcccttgatctagaagtattctctttgaatccttccatctcttcctcctggtacaccagatgacttcatcagcatctccctcttttatgctaacacctttcgctgtcaacttttgagacctccccatgtatctataagcttcccagtctcttatggcaaatttaaaagtttacaaataggttctctcattgaaaaaaagcattgtagtaaagtttaaagtggagctcagacaaatcatgacttattaagagactacaggaagccattcagcatttaataataactgtttacaacatgaggcaaagctaataatgttatggttttattaagagatctgtcatctctgtttttcttaaactggtttaacagtcagagctttgtaatgtgtttcagctgaagatttattataggcttgtaaattatctaaatgttctttttagaccccatgacaggagcacagaggaactgagataactctgtgttatgagagggtggatgctggcttgtgccaaaattattttagagtcctgctctttagggaaaactttgctatggtaatgtttctttgaaaacaaatttaccagcaactgcgttacttggtgttttccaaagtacaacatccaaggcttgaaccttacccgtttctaggccagactaggccagcctctagttttgataataattcatacctttattggaatatattttggatagcagtgaagaattgaaagcagctcctaaagattggtttgtttgctttgaaaatgtttacacttattcactctaagcagtggaccattttgatatcaggccctatacataagaccaaaaccagaaatatttctaaatctcaaagatttataagtacagtacctctggctgaaaactcgttaaacatctttggatattttttctttatatctttatgtaattatttctgtaattaagtgtacattagggttatttgctacttaacaagcctaaaggtatagctgtatatagaatgtgctctgtgtttttctgtttcctgcttggtttgtttctggtatgactatgtctactttttatttaaggaattttgtgtagataatactctcactaacttgtaaataggataagttatgagattttttggtattagaatttgtaataataatgacttttagattttatttgaaaaagctacttggaaagcagtaaatagaactatagtgatatatatagatacatagatatatacttttttctgagaatgtataatatataattgtcaaagatttttggaagtctttcaaaatatacttaataccattttgagaacataccttctaatttatttccataaggctgaagaacttttatttacaaaatgtaagactagataatgtatgaatcagtgttactaggacttatcagtacttaaaatagcaacttggcattctttattttgtttcctggttgttttatttggagggataataaatgtctaagttatttccattaaaattttgaaatgtttgtatactttatgtgtgccattttaaagtatatgcaagttctaagcaataatctgcatgttatacaaggttgacatattttgtcctgaaatttttagttaacatttcaagaatgataaaatgaacaccctgtaaattacccttctccccctcccctccatgaaaaccttgggattttcttgtgctagaacactaccacaatgtggtgcaaagctttgtattttgtggaaaaaaacaataaaatcacaattatttagtgcaaaa

SEQ ID NO: 712 - DNA, 81757 bp, Homo sapiens
atagctgaattcaatgtttattcttatggactacttagcatttgactagacggtatgaatttctaagtaaggtaaggatttctttctaagttgtttatacctagaacttaaaagtgggcatgaataaatcaaatatgggtggtttttagttgacactttattttcccgttaggaaaaaattagtgactgatcttttaaattgatttagtgcatatactatgtattgtgcatatgcaccaaacaaatacttagtaaaaggttgtcttgaaggaacatgctgatatatttcaaataaaagaacttagcaaaaatgaggaaaatacctaacattctggtaagacagtgaaagagggatgagcaatgtttgttttgaaaattatctgcgaactttaaaaaaatctctaagagtgtattcttacttgtaattgttcatctagttacactacagagttttattagctgctccaagatgcactgcgttccattctgtggtggaaacaaaaggaccgtagtagtggttatctagcagaagaatcgtgatctttgaattctaatacaagaaacttagaagtctcctagatatttccactgtctcagggaagaatcattaagtttatgtcattttttaataactaaaacaagattcaaaaagttaagattcaattctcattgggtttctattgtttgggactttggataatagaaaaaaatatgaacaggtaatttaggtttttttgtgttactggtacctgacaaaacaaacttgagcttcccatttcctagaaacttggaggaaataatttctgtccagaatggcaaattggtgtcatatcccattataagcatattttaatcaaaagatgcaataaagtgtagtggtcaagatcatagtctctagagtcaagtaatccttggtgcatttacctgcttcatcattaaccagttgtatatttttctcagagccagtttcctaatctgtaaaatgggggtagactagtattgctgtgaagattaaatgaaatttattaaagtgcttagcaaagtgcctggtatgtagaaagtgtttaataaatattattatttcagaatatagatgtaaaagacaaatgatttcctatataatcatattgagtagcctgaaagtttggtggctcttaaataaatccatgaatgaaggctctgcctacttttggcgtgtggcccaccagcatgttctatcagttggcctgagctgggaaagaaaccaattcctgtgttgagttttcctccaggtgcttaaaatagaccatagcttaatattttgatcattaaccagtgattctgggtggcttctccttgctctggtcagtgaccggtgtaggtcacgtagtacagcattaaacaaggtgtttttcctcctgaggttgtcatgtcaactctaaattcccagagacttgcctaggagtggagagtttgttctgagttacataaccagcattctctttgaggctttgaatgtctgtctaactgacttctgactgcaggcatgcaaacttttcccctgcctagtaggaatgaataccccttttccaagtatctgcatagcagcgacccaggggctatccaagagccagttgcttcctgacttaatttctgggaagaccaattgcctattcaagagaaattccttcctccttattcttctgtcagatgagactagctattaggtattccctatctaggactctgacctgactctcctagaaaagaaaatgaggatccaagtccattccgtttaactggggctataaacatatgccaccagaaaaatcctgctattctggcttattataactttaggttctcctttctaacacaatactatctttataacatgtacacacctttccttggtattcagttgtagtgtttatatgttcaaaatccttctaatttagccccaactaaagtttccagtatatatttgcaggccccttttactgcaccatcttcagtaaaatgcatatttctctttcttcagcataggcttcacccttagaagcttgcttttctctggatattcatttccagcaggtctcagagataatgtactgtattgcatctttttctgttggagactagaatgcagttagcaggtgcagcttgttataataactgcagattcagattttttctctctgtaaatactgttaaatgtcccctcagaggctcattttaaaattgagtaacgaatgggggcttgtttttccttagtcctcgatcttggaatcttagagtctgtcattgcacattgctgcttaccatttagagttcaaaccactaattcccaagtgataagagattaagatacaaacctgagataggcaaatgtacacttgcagcttccttgctttaatacttctgtttcaggtgggatgtcttctccatggctatccaggtctgtcctagacaccaccttcgagaaatgagatcctttctatctaatttaacctagattagagacatcaccaagaacaccttctgaaggtgaaaaccttttaccttttctttttgtcccatactctatattccttaactgcaatcactacaatatcctgtcaattacacaaaattaatgttactatgaccaactttgataatatttctatttccaaattgacaaattatattcctaatctaattacattcatgcaaagctagtagctctgtagttatatcaacttggcaacaaggaaaataaacttagtttaaaaaaagactcaaaaagttaaatcacttttgtaaaagacccagaaaaaatatatatatataatcatataactattataatacataaatatataaatgttatataaatataatacatatttattatagataataagtgaaaagggtgaaattgatggagtcagagcttagaaatcttgttagtgtggtgggaggagagaaaggtgaggagtagtcagattatgaagaattccgtcagagtagtatgttctgagttgcaaattcaggggtggaacagaaagttctgggtgataagtgcaggaatctatggaaatgctacgctgagtggagtaaaagtaactagttttggagttcttgactttttcttcctagagttttagatttgctgataagagaggaggaagggacatagaaaactcagatgacccaagtggcaagcatttcttaaatatttcagacccataaaggtacaaattatactctaactcaaccttatatgccctatccagctcaaatactattgacattcgctaggtaccatttcgtgtaggagcaagggtcactctagaataaacttagattctcacagtgagatacagaatccctaaaggtacaggagcgatggcttggaaagagcacagttggatgacgagagtcccagctttattttcagattccagtgtggcgagaagacgggaaaatgagcaactcttcttaagaaaaaggagatagggaaatggcgctttggggaaagaattgagttccatctgaggagggaaagcagcaggaatctgagcaggttttgggtaacaggcagtttattgggtaatgatgttttcagagtacacaaggaagaggtttgaaaggaccaacagaaggggaaggctgggtgggtcgaggggaaacagcacagaacctgggagagacagtgtgtgagaagatgagtaagcaagcgtcctgttcacagcatgaagtaccagcttttgcagagacaggaggcagggtgggaagaaacagcccagggaattcaaggacaacctgccatggggtttcactgtatgcctttgtttcatagaaaggatttcaccacaaggagttgatgagtcaaagattcaggtgcaagtgatttattaaaatagtgctcttagacgaaaccagttagggggtagagaaagccagagtgatgggtagattaggaatataaaccaggtgagccaataataggaaaagcatggtttgctggggcttccaggaaataagcttctctccttaataagaagcgctggtgaagctccagttcttttcgtctgggtttagcggtgtgtgaggtcaggcctgaaacatctacagccacttcattatcacgagggaagctaggttgtgtataaggtaaacccacaggaggcaaagcagagacgtgaaacctagtgacatacgtcctgggtagagctggccagaggctcctagaagcctcagttatgtttctcagaagattccctttgttgtctaagccagttccaggatgttgctcttattgcttgtaacagaaatctaaattcccaaacactttattttaataatgctgtcatatttatctaaatgttctttaatctgggaattgagagtaatcaaaaatgactaatgacatcaaatatttacgtttagcttctaacacagctgaaatatttcatagcagtacaatgaaatgagagaatttcctttctctcattttcactgaaattttctcttcctttcactggaaaggaaggaattatacatgcacaatatctcttctaatttatgtcttctgatcttggagttagtctccttaaaatttgagtgtgaggagacctaggccctccaaaccaatgttccctattgaatttagcgttttattttatatgcaaaacattatatcctaagtgtgctttgtagattacatttctaattcctgttcactcttgtgcttttagtgttgcatgctctgacatagttctgcaagctgtctttgaaaagctttttacctcttctttttactgtacttttgtcttccctgtgaattccagagacgtgactgcagaaatagatgactgaatactaagtatgtataggttctattttcccacttttatttacgtttctgaggattccaaacacgtttgttgttcttgaggcatttcttctagagttatcttcttacagtcttttttattaaggtaactccagttcaattcttaccccttagttcctccccaccccaccacaattttcctcccctgcccccaattatttcaattgtccttgtctcttatattcctattttcttccgtaggctaatttgagagactgcattgtttctctttcccttttggaagttgagggtggcccgtggtagttttaatctgcttggcaaattcttgtaatcttttctcataaggattctacccctttctccctcaactcaagcagcctcaaggtcatcttgcctcctcctttcttcttggaaccaagcagcatgctttacttttcacttcttcctgcttgctaccttaactcctctattgtttctcttctgcttctaaattggtttcatccgagtgactcgagtgactcgcatttaccaagtattgcctatgagctctgtggtttgtgtgctgcctgtacaatataaaaggtaatccacataactgagctgaggtagtgggttgatattctcattttagaagaaagttgagatatgctatagtttaggaaataagacaagtaatctagatttgatttctgtgttgctatttatattagtaatctaattcacacaagaatgtatacttgtgagttacatagatctgatttttatagtagggaaatgaatattaacatgaagattaaacagtctgactttaaaatggtatataaatgagtttgaaagagaaaatacctgatttcattttctgttctgttgtagtaggagggttagtctttcgataacaggtctgaaatagcatgatacctggaaaccatgattactggaaactgtaaatattttaccatccagggttcaacctcctaccccttattctcctgacagtacgctgagacaaacattttattaactaacatctctctcaacattttcccctgctaattgcattttgattggttcaaattccgtgtggggattccttgattctgacagtacaagacattcagttctcttcaagtcatgtaatcgacttttttgaattagttttcagtttcattttgttttccctaattcaagttgggaacacttcattttccccaattcaagttgggaacacttccttggtatttccttgctacatggactttagcaaatgctactttactctccttccagctactcaggaggctgaggcaggagaatcgcttgaacccgggaggcggaggttacagtgagccttttcctagttttactgttggaagcctaactcacaggagagattatgcaatacagtcctgaagtcaagggaggagaggtaggaagggagaggggaaaagaagttccttgagggcatttactagaaatgcctcctggtgctgccttttctgttctgggctagctgtctccttgaaaacagcacacactaataggaaatttaaaaaaaatcctggactcggtatgctctgttgtcttttgtggagaagtcaaagcaccttctttttcttctccacccatgccccatctctttgttgcttgtttaggcaaaaaagtaaaatatttcttccccttatttggcattcaactgcttaattcagttatgtcttggttctgagttttctgtatcaacttttcctacaatgtggaaactttagatcaacagattcaattctgtcttcattttagaaaagttttcttacattgtatttatgtatcaactccttgatttgatgagttcttgacttcaggggccaatatcaattatcctaatactgtgtcatttatgtgctataatgtaacctcatctaattgcattcaatttatgttctatagctcaacctcatctagtgcattcatctctttcatctgaattcatgaagatatcacaaatcttcctctactttggctttcagtgatatcacttctgtactttgctagctctacattcttattagttatctctagaaattttagtccatattttgtttcctcatatctacaatcctcttctcatcctatcattttgtttagcttgtttttgagtacttgttttgttgtgtacatatgctggtcattaatttctaatataaaacatataattattttgtatatttttttctagagggtatagacctaatttaagtgaagttttcctttctgttctttgaactgttttattccaggttgggctttattttttggtcacttgcatgccattcctgtaccccacctattttggattatagtgtatattatgtagcatgtcagttttttattttgcccagttagtggccaggtaattaaatcagttctgacatagtaggtacgtgatgggctcttgatttttttttctcattttgtctgagacctataatccattattgcaaccaccatcgccaccacctcacagcaggtgactctggtggttgggtattttgtgttctctcatttgcttaggctgagttattggcaggggtggaaataaactttttgttagataattgaactgactctcatttttggacctactgaatatcacattccaatgtttatatcatttagttggtggtgtgtatacgcgtgtgtagtgttctaaaggggaatgcactggcgttttgagtggcttctctctgttcaatgtatcattgtataagctatgctcccattgtcatgtcaacgccattgtttatgttcccatttgtttcctactccttcccagtcaagaaagaaagaagaaagatttctctccaaatttaggcattgtgttactttcctcaggctcctttaacaaactaccacaaatatggtggcttaaattaagaaaaacatatcctctcagttctgaaggctagaagtccaaaatcaaggtgttggcaggcccacacttctgaagattctaggggagaatccttccttgttctgccaacttctggcgactcctggtgttccttgtcttgtgtcaatataagttcagtctctgccaccgtctgtgtctcctttcatacctctcataggacttaagacacagcctaatccagtatgatttcatatcagtcttcaccttaattacatctacaaagacctattttcaaataagctcccattctgaggttctaggtggatgtgaaattttgaagaacaaccagtcgatccactacaaatatattagaaaggactttcagggcttcagcaacacaccacaaatctactgtgtctgagagtgggcttcacctccctactaatggtctgttctgcagatcgctaatctctctagatctggtaaattgctccttcagcccaggatgttagggtacttgtccatgttgctagtcttgggggtacagcatcattcttgttagtttcacttaaccctgcctgcagctgtataaatagtcacattagtaaactattgatgattaccacaatatgttgtcatatttgctgcctgagtaggattactggttgactttgcatccttgccttataattgatttttacagggactatttctaatgtttccccattgaagattctgtctgtttttatagggttttcagacatattctttgtcacattaaaaccttttactcatcaatgaggaatttgcaattactttgtacattatctatttttttctgcatggattcagatgattggtttttcaactctaatctgcttaatatgcttttagcctgggttttctagaaaacagaacctgagcaaggattaaaatgctgatgctttatttgggaggttaaaaactcagggctgtgagagagaaggaaagcggaagcaaggcaagggaagatgggcagctttgtaaacggacagattaccatgctggctactgcttcacgagtagtcagaaagacccagcaattctcttggtcgtagcattcatcagtgtgaaggacttttctgaatgggaatgtagaaaaccgtgcctcaaagtcctccacgggaggaaagaagatggggggattcatctgcccagatctagtcgttcctgttggttaaaatttacctcacaggaaataagcagttccatatatcccaatgtcatcatctagtccctttaatagcagctcagagtgctgagtcccatgccctgctgtatagagttccattccattccagaagtatcaggaggaaccagacactccaggtacatgcctggttggctcagctctgggtggtggccaaggaggaaggcttggcactctcagggcaaatgactcaacagagcctcacagtgacagttaaggtcagtgacacatttgagccaaggaaatctgaggcacacagactttggtctgatacatgtgataaatcacatttataaatcttctaatggtaaatcttctttggattcctggagaaaacccaacttggtcactgtggcagccatgaaaatgtgggctcacatctgctgtggggagtgtgggtgattgcagccccaggtgctgctgtctggatcatcaccacctttgtgtcatggccatgactgatctcagctgatgctccactgattattcattccctcagtgattgagcacagtggcaaggctaacaagggaatcctctaatggatgactttggtgcaagggttccccagtcatctaacaaaactttcttagaactgctgcaagcctgacgttcctttcactccatttccacccttcctctctcctttaacatcacagttggaaagttctcctcacttctgctttccccctttatccttcacaggaattttcctcactagcatcccttgaacatcgtgtcccatcttagtgtctgcttcttgtagaacgtgattagcacagtcataatacattatctgttttaatattgttagatttggtttacaacattttgtccagattttcatatctcttttcctgagtgaaatagattatcttctgtcctcatacagtcttttcctgggtttaaataatgctgtccttgaagtttggtagaatttgtctggaaaaccatctgggcctgctcgagctctccctctctctccctctgtgcgtgtgtgtgaaggttttaaactgctatccaatttctttaataattataggactctttaagatttctattttgtgtgtatgtcagttaaggaaagattctcagaaaactgtttttaaatccactggcagaatgttgctgatactattatcttttcacatctctgctttatctgtagttaggccaacttttttaacatactacattttctcacttcattttgccagaagtttgtctattgtcaatttgtagtcttgttaatcaatttttgacttcaaccttttccattgtatatatatatatttttctattttatttccactgttatattttcctgctacttttttgaatttttctttttttgagacagagtctcgctctgtcacacaggctggagtgcaatggcacgatctcggctcactgtaacctccacctcccaggttcaagcaattctcctgcctcaggctcccaagtatctgggattacaggcatccgccaccatgcctggctaacttttgtgtttttagtaaagacagggtttcaccacgttggccaggctggtcttgaactcctgacctcaggtgacctcaggtgagccactgtgcccagccctttttaaaaaaaattttctaacttagattttatactcatttaatatctgcttacctttattcctttttaatacaaatgtttgattaaattctccttaaaactgcttttattgtattctacctctttgtatatgttgtgctttttcatttggttctgagtaataaccatttttatgttagaataattttagagttacagaaaagttatgaagatattataagagttcttgttggccaggcgtggtggctcacggctgtaatctcagtaatttgggaggccgaggcgggtggatcatgaggtaaggagttcgagaccagcctggccaacatggtgaaaccccatctctactaaaaatacaaaaattagccaggcctggtggcaggtgcctgtaatcccagctactcgggaggctgaggcaggagaatcacttgaaacaagaagacggaggttgcagtcagccaagatcacgccactgcacttcagtctgggcaataagagtgaaactctgtctcaaaaaaaaaaaaaagagttcttgttaacttttgcccagcttccactttgttaacattgtatatacatggttcatttgtcaaaacttaagaaattatcatggtacaatactactaactaaactacagattctatttgaaggtcaccagttttcccagtaacttcctttttctgtttcaggatccaatccagaataccacaatgcatttagtaattaggtctttttttttattttcaattttaatttttgtgggtacataacaggtatatatatgtatgagatacatgaaatgttttaatacatgcatgcaatgtaaaataaggacatcatggagaatggggtatccatcctattaagcatttgtcctttgaattacaaataattcaattacactcttaaaattattttaaaatgtgcaattatgttattgattatagtcactctgttgtgctaccacataataggtcttattgattctttctaactattttttgtacccattaaccatccccaccttccccgcaaccaccactacccttcccagcctctggtaacaaacctactctccaggcccatgagtttaatggttttgatttttagatccaacaaacgagtgagaacatgtgacgtttgtctttctgtgcctggcttatttcacttaacataataatctccagctccatccatgtcgttgcaactaattggatctcattcttttttatggctgaatagttactccattgtatatatgtaccacattttcttttatccatttatctgttgatggacacttacgttgcttccaaatcttagctattatgagcagtgctgtaacaaacatagcagtgcaaatatctctttgatatactgatttcctttctcttgggtatatacccagcagtgggattgctggatcatacagtagttcaatttttagttttttaggaacctccaaacttttcttcatactgttgtactaatttagattcccaccaacaaggtatgagcattcccttttctccacatccttgccagcatttgttattgcctgtcttttggatagaagccattttaacgggggtgagatgatatctcattatagttttgatttgcatttctctgatcagtgatgttgagcaccttttcgtatgcctgtttgccatttgtacatcttctgagatatgtctattcaaatcttttgcccatttttttaaattggattattagattttttcctatagagttatttgagctccttatatagtctggtgatgaatcccttgtcagaggggtagtttgcaaatattttctcccattctgtgggttgtctcttcactttgttgattgtttcctttgctatgcggaagctttttaacttgatgtgatcccatttgtccatttttgctttggttgcctgtgcttgtggggtattgctcaagaaatttttccccagaccaatgtcctagagattttccccagtgtttcttgtaaccgtttcatggtttgaggtcttagatttaagtctttaatccacttttatttgatttttgtatatggcaagaggtagggttctagtttcagtcttctgcatatggatatccagttttgcaagcaccatatattgaagagactatcttttccccagtgaatgttcttggtacctttgttgaaaatgaatttactgtacatatgtagatttttttctgggttttctattctgttccactggtctatgtgtctgtttttatgcaagtaccacactgttttgactattatagctctgtagcataatttaaaatcaggtaatgtgattcctcctgttttgttctgtttgcttaggatggctctggtagcagttaggtcttcttagtcttctccaaacttcaagtttctccttttttgtttttttgtgaccttgacagttttgaggtataatgctcaggtaatttgtagactatcttcaatttgactttgtcttatgtttttctcattattagactggggttgtgggttttgtggcagagtactacacaggtgtagtgcccttatcacatgtagggatacataatagcaacatgacttactgataatgttaatctcaatcacatggttaaagtaatgtctgtcagggttttccattataaaattactattttttcccccatgctctggttgttggaactgaatgactaaatccagcccacactcaaggggagggaaattaagctgcccacctcttggaggagggtagtatgtttatatatattatttgaaattatttggtatggaaaaaagttatgtattcaaccatttatgcacattagtggattatttatattacatggattttttattctttgggttataatctaatattataatttattttgctgcttaaaatttctagctgctttggtcattacaggctctttaaagttgatgcctgtgtccttttgacatacccctactttttaaaaattagcactttctttctcctcctcatgactccccaaatttgtattcttataccgcttatatttatctagatcagagaaaatatatttttccagagagaaattaggctaaattaataaaagatgttatattagtcccagttttgatatttataggaaaaacaagtcttacatgaataaaaagcaattatacattttacatattaccttcaggggaaacatacccaaagaattcaaaattcatcaaaaatacctgttaatatatttgtgttattttcatccatcatattctgtagagattaatgacatattgttcccctcttattggaaaaaatcagctggcttaattgttaatttttttgaaatttcttggcaagtcagagtaattcatttggattatcaagagaaatgttcatagtataatgatctgaattctgattctcacaagtcattaatcactgaaaatgaactgcatcccacatccacattggcagtgagaataaatttgcttgtttgttatgattatggatttgatttctcatctcagcacatatagaactggatgcccttgtggtacatctcaaggctgatttgaaagcttgagagaccatcaagaattggatttggggaagaggtgagtatttgctatactatattttactctatgtgtataaattccttgaacagaaaaattttaatacaacatttaaaagacatattcagtcatcatctttagcacaaatgaagttttggcaaatgtatgcagatattcctacacaaaaatactatttcttgcacaagaaatagtattaccattcaccaaaatgcactataaatctggtagagggttgtaacttatagaccttccatgttgttttaaagaaatatagaattaagaacatttacagaaatctgttgtttctcactttaccaagtgtaaataggggtatgtgtctgtatctagcatatgtacttaggaaattgttctactcataacaaacctatggtcttttatcagcggtgtgatttgcaagtagtagagaacaacacctgggaagcttgtctttctgtgttttctaataagcctgtaatcattttgttaagccccttgggatggccttggtctaaactgcctcttgagtaatcccaagtactgacacaactttgcaaataataatcaaagacacatgtaaatatgccaactaaatttggacctatgtttaatgcttacttatgttatttagtgcacagtgaaatatttaaagtgatggctaacattttgaaaacatcaagtaatatcaaacattaagtattatttacccagatataagaaggagaaaatggaaattcaagtgagaggagcatcatggtaaatcagtctgtgccaaaattatgaatgaaatggagctgcattcttgatactaccttcaaaaatcctccaacttttctagagccaagctctagaaaaagcttatccctttttctagatttaagattgggtattgggcacaagaaaggagtgtagctttcaaggttggtcttttccatagttgagaactagaaactgagctagagaaatcatacatggtatatacacatttgattgcagtaactagggcctgacatagatttgattacttctattttaatctcaagagatgtctatgtccccaaactagtttactctacatcatagcagagaaaatggacaaaacacagctgttttggtaagtatataactcacttggtatgaacagaattgtgcagatgtactgcagcggtgtgtcagtgtctgcttatcagttcttgttctcttttctgcccttcctcactctgctatgtgccacattgcaagaaaccacatttcccagactgcctttccctctggcttctgtgtatgtccagccaatggcaggcacaggcggaaaacgggagggctggaggagaggggagggaagaagccacgttccccccattcaccattcttacttcctgaggtgtcctgccagaggctgcctctcttctgcatcctcttagtggctctaatccccccagacggtccagactctcaccagttccttcttctgttatccctccagccttatgggttatagcagcttcttgttactgctaatttctggattgcctcactcacccctattgcttcccagccatcacccatgtggccaattttctgtaagataataaatttcttctttatcaaaaacctgtggtgtttctgctccctggctggaccttgcagactactagctatgtcaagggacagggaaaagtatgaacagtagggcctgttgatgtcctgcccagatccccttttctaggcaggtgcacccaaactccagctgctgtgagtgctggctgctaatggcctttgtatacactcttccagagatttacctttgcccagagatgcctgggaagctatgatgtttccccgggggtggcccatgcccaatgacaggctgatttgaggacaagctggccccttgcagcaagggtgagcaagtctgtggtgccactcaggttccagtgctcctgatgctatgagatagagaccagacctcagccaagctcattttttgcttggcttcttccctttctctgtcctacttccttgattccttacaattttctcctgaaagctcaccctcagtaattccactgcatgataatcaccatttctggctctgcctcaagggaacctgaactaagagtatattttacagagggaatggagaaaatctgtttaatctggtgagatggtgaaatggaggttgtgaacagagcttcaatgtagtgatgatgaaactaaaaaaacacaacagctgaacattcttgaggaacgaacagttgtgggaggactcaacattttgaaattaaggagaaaagtggtgccttgccaaaattaaggtctggagaggctagttttcatggcaaaaggatgatactgtacttctgaccagtgtaatatggcattccaagagttttcaagagtatcaatacctgtggggtagttagaaatgcaagtctgttttaagactagaaatatatattctgtgagataattatataaagacagtttttctcaggcttgagtcatgcacaattctttattttggaaaaaggctggtgtgggtagtcttgtaccaacgagcaggattgtgattcgggggagtgaaaccagcagtgagggaaggtcaacacagatgtgttactgattggatcccaaccattgggaactatgcttaatcccgggggattttctggagaacattagtaaatatgtttcagaaccactcaacaagggcaaggagtgggagcatttattcatcctctccagggcccccacggatattacctcctctctttctgggttgtgtgtgcatgtgttgtgggggtgctgagaggattcctgtggtgctctcaatctctgcttcagagctctttgggcagtggtgcagcaccaaggcaaaatgccactgactgcccctgtagctgccggttaaaaccttcacagaactgactgctacaatgtggctggagtaagaggtggactaagtaggttgaagtcctgcacaacaggtgtcctgtatggaccctacctgtagttatatccatggggtagtgaaaagactggatatggagtaaggtctgactctttgccacatagacattaacctctgtgaccttgggcaagtcagtcctaacttactagcgtggaaatcgaagctaagagtgttcaggaactgaactccgagcatacatctttcagggttatgatgacttcatcagacccctcctttttgtctccagaccccaactaagtccttcttaatttaaaatgcactatttaattatctttggggactatgatcaatttacagaggaggtatcactttctcttctgagttccatcattcctagcattaactctagtacacaccgtgatgtcgcataattgtatatacctttacttctgctgtgtggagttcagattgatttttttttatctttgtgcacacaaacactagcaagctggcaatctgttgtactaagatttgtgcctatgaatacttgatacagagaaagaggtcaaaggagaaagagatggaggagattgggggaacaactgtagcactgcattccatattcttgtgagcacttaatcttgtcagcaggagcaaagcaaatccatggccctatactgtctcttaaaaaaaaaaaaaaaattcctactcctacatccttaggctggccttttttccattttgtggattccttccccttttgaatcttttcttgaagttattgaaattcattgcttcccaatttttaaataggataagaatattgttgggcagtgaggaagattggcagggatggggaggggttttcctgaccccagataccttgaggctgggcctggccacaccatggctcctctctccatgtcacctgcaacctccccggtcaaaaggaaagctgagaagacgggaaggtgaggagagggcggtaggctgtgaacgaatatttgtgtacctattatagagccagacattttacttcatcgattgatgtgtggatgaaatacattatttttatccactgccaccttgaacctccatttcacaaggaaggaaacagtttaaagattatcatattataagtcatctcacttgtaaattttggagctataagtcacagccaagcctgactccagagcccatgctctcactgcttcctgctgaaacacccactgggttgaccccaaggctcaggtgtcaccactgtcaaagaagcctgccactctgaattgggattttttcccctacttatctgaatagaaagtttgctgtcctactaagcaagatatcaagctccgggccaaaatttattttcagctcttcagtagaacaaacacccttattttcccagatgggtgggaaatggtgcttttgtacccacgttaagcattttatcagaggctctcaccctgtggaattaaattcaagggggctcagcaagtgtgtgccaggggtgcatcctcttgcctctctgcccttagaagagccttaagttcagagctgagccctggatattccataaaagtgctgtgcatgctgattgagacttgcagctttggagacaagaacttcagctatcagagaaccctcagatatgaccaagatggatcctgttccatagaatgggaattacagtctcttatagcttaaacgtgtgtccaggatccatgtcagtatactttctcagagcaactaccctatcattgcatgtgatatatgtcttaaaggcgtcattaagccaattaggatatgttgccttctgtatattttgtgctaaatcctctttattagaaaataatcagaatttgaagcttgattgatgtttggcccagttttaagtattatttaccaaactagagatagctactctaatccatttagaatgttaagagcagacctatataagcctcatgggagaatagagtcgtgatgcttgttcaaaatttttggaaagcaccccagctggcagctggcttctcttggtattttaaaagggcatataataagcataaatagaagtatatgtggtagttttcttatggttgtttgtttgtttttaaactagaatgctataccttgcgttttcttttatcttgatttttcaaacatctacctggcccttaaagctacctccttcacaagcctggtctatttgtgtggtttatatgtgctggatgtttatttgggtaatctaaggtagcagaagaggaatatatttagtcatctaacctttacaataaggaacatttgaaatgtcagcattttatttcaggaacaggtgagctattgcattataaggcttttatttatttatttacaccctacatgtttctgaaatttgaaacagcttagaacagcttatgacaaacagtaaaaaaaaaaaaaatgaaaaaaaaagatgaaagaggaaagagtaaatattccagccggaaaagtcaacacagttgctgtgataaagtataatcctgtgtctaagattcttggaaacagggcaaagtgagaaacaaattataaaatctttaatattcagaaagaagggaagaagttcctctggttaaaaacaagtactaaggtggccagatactgggtcaggtgccagaggcaaaactacatagacatgaatgctattctcatgaagctcacagtatagtaggcatgataaatattaaatctatcgatatataactaattatgcttagcttttgtatcatttatggaaaagtaagagttcctaaatttgcttaaatgtctctggcttagaatccttccttgactccccagtctaagacctgaaagattaaaaggcatcacccaggttcagagaccaagagaagtgatggggtaggctggagaacctgcagacaactggtgtaccttggaagagaagggcccagaggatgctggaaagggagacagttacagctaggtcaaccacatcccaatgcactgattaagctttactttatcaaagaaaaaatgtggatttaggtaaacagcttttatttctccagaaatattggcttttattttgaaattactatgcttactaaatcgcacgctttaggccctatttttttttccaaataaaatttggcaaccctatgtcagttcacgaaaaccattttctttaggaatttaactggtccatgaaatccaaaaagctgtgaacattggtccactaagaccctcaataaatatggctggagagataggaggatagaaaaagtttagaggtgaagcatgacttagtgacaggatttcttcatgggactaagttaatgtcttctaagcacaaaaatcatggctgttgtggacagttatccagattgaacagtgtactaggctcatggggtaaatagaaattgcaatccagtcctggttcctctcaccaaagcatgtaccatggtaggaggcagggtctacctggaagaaggggaaccttttgtctttatagaaagacactgtggccagtgacagcacatattcttcctgtgatccagcttaatccaagggtagagtttaacgaatctgtagaagtggatatacggtgtgcaactaggatctctgtgacatttctaaccaggatttttttaaagtatagacacattcttcactatcctctagtagggtggtctaaagtcccagctgttgctgattaaagatggctatgtaggctttagaaattaagcaggcaagtggaggactgagcagcagtgagggaagaagggaacatctggatgtcccagcccttgaggttggtactttattattttacataggcaggatgtaagtttactaatagaatcctgattaatcaaatctgtaagagggtgaggtagcctaggatagtagggagattacttcttttttttttttttttgagatggagtctcactctgttgcccaggctggagtgcagtggcacgttcttggctcactgcaacctctgcctcctaggttcaagcgattctcctgcctcagcctcccaagtagctgggatcacaggcacgcaccaccacagctggctaatttttgtatttttagtagagacaaggtttcaccatgttggtcaggctggccttgaactcctgaccttgtgatccgcccgcctcagcctcccaaagtgctggaattacaggcgtgagccatcgcacccagcctgggagattacttattaaagaaaatattgtcgggcatggtggctcacacctataatcccagcaccttgggaggctgaggcaggcagatcacctgaggtcgggaattcgagaccagcctcaccaacatggagaaaccctgtctgtactaaaaataaaaaattagtcaggcgtggtggcacatgcctgtaatcccagctactcaggaggctgaggcaggagaatcacttgaaccaaggaggctgaggttgcagtgagctgagatcatgccactgcactccagcctgggtgacagagtgagactccatctcaaaaaaaaaaaaaaaaattcaatattagctttgactgtagccaattttgaatttggtccttatggagcaatatttttcttcagacctcactataaagcagaatagaatggttctagacaataacttttcatggagggtatagccagtcatcatcaatggccatggataaaatcctaactaaaaattccactttgacaaacatggtctcctaaatatgtctaccaggatgcattagctgcaaagtgcatccatccatgggttacagggtaaactgaccttctctatggagttctcttataattcaccagttatattggaaactatgctgaaaacaatgcctgcacttagctaatgctcagtctaattcctggaaataaaaaatcacccaaattattttccttttcccccaacatctttttcttcgtattatactaattcatgttcattgaggaaaaattagaaaatggagaagaaaaaaaaatcacaactctatcatgtaaagaaacaatactaacattttactcatgctgtcaaatattttcctacccacatatattttgcctgtgtctgtctttaagctataagttgtgttgatcctgcttcttacaacctactttagatcagctttacttccatcctacaccatatggaagtgcattctccaagattcctggaattccccagagattcatatttatctttgtctctttgtcaacattggttatgacatctcatttctttcattttgtagctatttccttttctccacttcgcaaatagctccattctccccaaacacatacaatatcactcacaaggtagctctaagttctttggccactgactaccttgttcctatgctctttctctgttccttctctcttctctccttcccacatccgaaattcctgtttatttcttatttatggtaccttaggaacatgccttgatgagatagttcagaatatgagggcctgggtgggaaagaggcaaagaccctaaaagaaaccatagtgatagctagtaaaatacttttttttttttctcacaccacatcatgtacttgacttaaagaaggaaaatagagtcatatgactttggcatacaacttctccattggtcaggctgaagctttcttggaaccccactctaatctgagactcttcccacttgatcttccttccttcctcgactcttttcaagtgttagaactttattatgatcttaagcttcttcttgccttcttcagctccttctccttgtccttcttgaatattctaccaataaatcttctgcaataattctgtcttggcatctgcttctctgaagaacccaaaataatacacacacacacatttaccaagtgaccataaagagtcacaaaacctgttcttgcaaaacttggtgatgtgccaagctcgtttcttttaggtacttgaagttcctttcatgacaagtttactagaggcagacactaaaatattctagtgctaactgctcttgcggtttctatcatactcctattaatgcaagagcagatgtgcttgtacatttttccaacaataaaatattttgagtatctcttttgctagttagcaaacccgatactgatggagttagttctcattgaagcacttgcagtagctgcttctaaagcacagatttgtggagtgcttgctctgaataggattcttcagatatcaactaaccatccctgtggagcagattcgccccgtgcatgcatgtacatatcacatagcctatgcatatttgaaataaatttcagtataatgtcgactttacccatgacagtaaacaacagcatgtcatgactgcataatggtcaattgcatgaatatcccacttattttaataaattctgcaagataggttattttgggctcctaagttttcactgtttctgatttagcaaatctgtatactttgcagtgtccaacttttcatagactatttcctagaagaattattggcttaaaaagcatggccaattttaaggtttttgatatttgttgccaagaagtcagccaggaagtttgttccaatttacacttgaaccatttctatatgagtaggcttatttcttttccttttattttctgcatgtgaaattatgtgtaaaatgtacagtccaaagaacaacagaaaaaaacctaacccttgaatcctccaccaaggttatgaaatagaatttattaagttggtgcaaaagcaattgcggtttttgtcatgacttttaatggcaaagaccacgattacttttgcaccaacctaatagaatcctcctgcatttgctgattctcatcatacttcttcatgcctcccctcttcacaggtaaatcatctagaatttagggttatgcattcccttggttttcttcatagttttcatagttaaatgatagagtgtgtgtgtatatataactatttgtagtcctaaatattatatagattttttaaatgtgggcggcaaatacaaagctagttgtgtgaggagggtatggtcaccgctgttaggtaaagttgtctaggacaagatgaacttgcagtcttctgcatcctgggactttataagggggctttctggtatattcagagggagagaccatgaagctcaccacagtccatacatttgcaaggactgtaatgcaaagcaggtactaaccacgtgatcagtgggagtggcatgaattaccctgggtttcttgctgctaagcttgttccagctcgcagaagtcagtgataacagaacactttggcagaatgaataaatgtccacagttgatttaggcagcaggacctggaagaaagaataaggaatttattagcaaattgtcaagatcactagattcgtatccgggccagtctcaccagaacatttctccaggtgtttaaaaaaaaaaaaaaaaaaaaagactgtgccaaagcagtggggatcatggttctaacaggcagaggcatgtccatttagactcactcctctccagtctggtccagattccagctagcattttggaatgtctgttcaccatcctcctaggaatcccttgactcctcttctattttgaactaattttctgtatcacgttgtcgtctttattggtttatactcttattttggtggagcacattttcccatagcttcttgaaaagagaggatgggtaatacatttattttgtttttgagatagtgcatgtctgaaaatgtcattctgccctcccgtttgggagtttgaccatacttgcaagttacaagtaatttttctttagaattctggatgtggttgcgttttctttttgctggcaagtcatgctgttgcaaagtctgaagccactatgattcctggccctttctattagcttttttctcctggaagttgatggactcttctttttccctagttttctgaaatttcaaaatggagtatctttgtgtgaatgctttcatccaccacttttattcagtaagctttttttcagtaatagcaattcatttattattctggaaaattttcttaaatacttttgttttctaccctgtttcctgttttctctttttctctagattttttagagttgtcacctgattttaaaaatcttttttgcttattttctgcctctgtgtctatttactgtctaggagacagtctctactttattttctaaccctgttaatgacttctgctcttatgttctcaattccaagatgtcttttctgttaatttcttatgccattctgttccttttttatgaatgtaactttttcttatctctctgaagatgttagttatagttttatttcatttgtttttgttgattttcaccctcgcttgcttgcatatttttatttactccaggatgtctttttgtaagggaggttggtttcatttatttctgtcttctgtgacagctttcctcagggtatctggtaatccctcaatgtctgcttaacattaagaatgagggaagcttattggaggctctaagagctcggactgtgggccatgcctctcaggcggaagtcactggagggtgatacaggctgggtctctgtgttcagcattagatatctgtttgataaattagtcttaacctctaccttaactctaatctgtgcctggaccatcaattcagacattattatgctttgtttctccatggatttctccaaagaaaggggcaattgttcagtaaagtggagtgcaggagagaatctagggggtttaacttcttaaatcgtttaagagtctgactccatttttatctttgactgctgagagctttcatgcccacctcctctttcctcttctgcctcatatttgagcaagttggtaagaaagctggtgctgccccctggacacagcagaaagttcaacctatgtgggggagtggattttccctcatccaaccgcctatctatgataaaaaccaagtctacttattctcattcttgctttcgaaacgttctcaagctcattccagactagcctgggtgttgtcccactatgtttagaaagttccatgatgtaatacaatgtgttctcacctcttggtgtgtacatggcgtcatcagtcaggacgtctcacctattaattgggaggggttcatcccacctgcattggatggctgtaagaaatagctttcctatgaggttttcttatcttagtctttttcttttttttccattaccagttccaaagcagttcctatgtcttttgagtactatatggtacaagttggtggactttcacattttcccattaactacagattcattttcttgggtttactaagtcagttactacttgcccatttttctctagtttccaaatttttgctgacttttttgtttgtttgtttgtttgttttgacctcacctctttttctgctttatccatttcttaaaaaacaaaaacaatccttcccatagtgggggggtctgtggttggggggcagtgaggtggggatggttaatggaatagaaagaatgaataagacctactatttggtaacacaacagggcggctatagtcaataacttaattgtacaattttaagtaactgaaagagtataattggattgtttttaactcaaaggataattgcttgaggggatggatacccctattctccatgatgtgcttatttcacatgcatgcctgtatcaaaacttctcatgtaccccataaatatatatacctactgtgtacccataaaaatttaaaaaatttgaaaagaaaaatcccttccctaaatttttattgagttaaggagataagaaacaaaattataaacatgtatttaagctgctgtctttacccagaaatcctgagtgggctcatctcttcacaccttgtcaacaatgggtgcttttctcatttatttagtaaatggatttccctgaaatccgtactatgttctaattgctttgacaactgagattattcatattattggattctggtctaaactacttgttcatataactaaaagcctaaaggacaatttcatgatttgtggcagattctcacatttagccatttggtttaccctaaatttgcttccattttttagtagtgctctattgtaatgcagatggaaaacatcacaatgttctagaagggaactgaaatgaaaatgaattatctatacctatctccactccacttatgtaagggaaattgaaagataatcacttcatgggtatccatttaaaataaaagccacttttcttttcttattgcttgtgaaaattcaacccatcttttgaacaaatttagcagtgatttacaatttttggttaaaaatgccagacttaagatttcaaaatgcactcctttgttagaaaacaatgatttcatcaaatggtaaccctactttgtcttaatagttaattcacaggttggtgaatctatttattattaaatgtaattcaaaggttattttcacagtaaaagcatacagataaaaattagccccttctcataaataccagagtcctagtctcccctctcagaggcagtggactacattaaatttattattacatacgttttgagaaattatttatgtgaatacaagcatatatatgaatatgtaagcttttttcatataacaagagcatttttgctgttccatgccttattttattaactgtacatttctgaagatttgactgtatcagcacatttagatcttccttatacttttaatatttttgtgaaaatagaataaatacagagaagtgcacaaaacatagctaaatgaatcaacacaaaacaaaagcccacaagataaccacctggtttgccaggcaatcaagcactcctaggctttcacaaggctccttcatgtcccctccaagtcactaccttctctgtctctgtcaaaggaaaatactttctagcttctagcttctatggtaatcctgtccttgcttttctttagtgttatacctaggtgtacatccttaaacagtacagttaagttttgcctgttttcagaatgtcaggtaattcaaatcatacagtaggagttattttgtgtctgacttactccgtgctttctattcatctcatctattctagggcttttatatgctctaaatttttccttctttctgggccttgctgcaaatttgtaattctgtttctccccctacctctttagaagttatgcattctatagttcttttacttgtgaaccaccaaattatgatatacttcattggttcttaaaaccttacattaattggtattttatacttttcatgggcaatgaaaagattctatattcctttcagacatctcacttttttttagccccttctaaagtcttaagccattattaggtactttaattctgtctttaatctgtatttaaaatatgaatgtcagtgtgttttatttatgtttaaaatttatatatttaaaatcttattattgtcattagtctcatttattttttagaaagacatttattcagtgtcatgaccagactattacatttagaaataaacagcatgggtgcaaaaaacaaaaaaaaactatgttaaaaccctttgatggaatgctttaaacgttccacaaacagaaactaaaataacctctaatgcaattagtcacaaatatagttcttcagttttttgcccatgcatatgagtattgtcttaaatgtgtcatctttgtagcaggtaggccttgccaccactgtgcttggctgaattcacaaatctgttgtaacctgtacctcccctgtcacttctctggctctcctctcctgttaagctttgcttcctggcagtaattaaaaccttctgctactattgctactggaaccatcatagccatcttggttttgtagtttggcaaagtattggcctcccccaccataggaactagagtttctgcctccaaagttccctcccttcgtaggcccaaaatttgaagattgattattgtaattgccaaaaatcgttatagctttctctaccttcaaaattgtttctatctaccaaatccattatagccgtgcccgcagccaccatatctacgatcaccacggctgccaccaaagccaccacaaccattgaagtttcctctactaccaaagttgtcattcctaccaaaactacctccacgaccaccactcacatctctagaactactttgacctctttggctggatgaagcactagccatctcttgcttcaataaggctttccttatttcatgattgtggccattcacaggatggtatttctgaatgacagtattatccagggagtcatggtcatcaaaagttatgaaagcaaagcccctcttcttgccactgcctcagtcagtcatgatttcagtcactttaattttccatactgttcaaaattatttcttaggtgatggtcttcggtgtcttttttttaatgccactacaatctttttcacatttaagtggttacctggtctctgaagttcttcatttgagacagctctgtttggttccacaactcttccatccaccttgtatggtgtattcgtccaatttgatgccactgataaagacatactcaagactgggtaatttataaaggaaaagaggtttaatggacttacagttccacgtggctggggaggtgtcacaatcatggcagaaagtgaaaggcacatcttacatggcagcaagcaaagaacaaatgagaaccaagcaaaaggagtttccctttacaaaaccatcagatctcctaagacttattcactaccatgagaactgtatggggaaaactgcccccatgaatcaattatctcccactgagtcccttccataacatgtaggaattatgggagctacaattcaagataaaatttgggtggggatacagccaaatcatataagatggctttgcattcatggctatatctacctccatggtgacatatgggacaacccaaaacccctggagtgcttggtgtttgagtctctcattactacacagtccataagagttctcactgctcaaaatggctgtagaaaccctcatcagttatttcaaagatcaaccatgtgatgaaaagcttctgcagctgttcaggctttttaggagactctgacttagacatggctgctatggaaagagagactttaatgatgcttctgcagcagcatccatggggagaaagctagtctacttatttaaatttgccctatattcatagctcttcatcccttcctgaatttgagcttccacctggtatcattttccttctgcctgaaaaacatgcctgtagtatttcacttagtgcagttctactggcttcaaattatgttttctgtgtctgagaattatttcactttattcttgaaatatttttgctacaattttgggttggaagttataatttgggggttgcaattttgggttggaagtccttttctttgatcacttagaataaatttttctctcatctttggcttctattacctgtgtttaaaagtcaggtatttgcctaattgttgctcttttgaaggcaacctgccttttttgttgtgccttctgactgctttaaaagttactttctctttggtttttaacatttttggtgaggtacctggttgtttatcttgtttgaggtttatagggcttcttgaatctgtgaattaatgtctttcagttttggaaaattgtccttcattatttcttcaaataattcctacacattctcctttctttttcctaggatttcacttatgctttctcactgtgtcctctgtttctcatctttctttctaatgttccatccttttgtttctctttgcttcattctgaatactttcttacagatcaatatccagggtactggttctctttaactgtctagtcagctgttaaatcaatctattgttgctaatttcacttatttcccagttcttgtagtttctgtttggttctttatcatggttttcagctctctgccaaaattctctatcttgtcttgtctctttgaacaaaaaaagtatggttaaattctatatctaaaaactaacatctgaagtgcatgcgagttttattttcagttatctgtttgattgttttcttgtctctgagtgcctggctattttttactgtgtgtcattgtatttgcaaaaatgttgtagaggctgggcatggtggctcatgctgtaatcccagcactttgggaggctgaggtgggtagatcacctgaagtcaggagttcgagaccagcctggccaacgtggtgaaaccctgtccctactaaaaatacaaaaattagcagggtctggtgatgggtgtctgtagtcccagctacttgggaggctgaggcaggagaatcacttgaacccgggaggcggaggctgcagtgagctgagatcatgccactgcactccagcctgggcaacagaatgagactctgtctcgaagaaaaaaaaaaagttgtagaagtaattttcagtttggtataatattttcttccaaagggaatttgtttttattttactggtcatctggggcattgatactctggaatcaccttaatctaattttatccacacagcatgtaggagaatactaaccctgcacagattgtgatggtgatgtggaatatactaaagcctagaacgcacctcctctggtaagtagggagatatacaatgaggttccagtattatctgtgcagctatttatttgaaaattactgcatgaccaggaaacattttaattgctttgcaaatattattaacataattcttataacagtgatttggaggtgaatattattatccctgttactagatgtgaaactgaggcaaaaaggagttaggtaacttggacaacagtacacagctttaaatagacctgggctttgaatccaagtagtaagagatgatgctgttgaggtgaatttagactttgcacactatattattctgagaaatggtaaattttggaattatgggggagggcagttaggagtggcgttttttactttgtcttatgactataaattttaaactgcattatctatgtgctactttgatagtggtgctggggtgttcaggagaaaattgcagtagtagttgttatatagggaagggaacatgccaggaaagatctcaatttgtgttcactcattgctgcagttcagaattgggaggaggcggaattgtggattaagtatggggtctctaaagactcttttgcactgagagcagcaagtatgaagaaattacatcttagaatcagagtttgtgctggattcatgcgtgggatttgttgattgtgtttctctccacaatgactgctcaggctgcttcagcatgaacagttggctcagtacccagagagtgtttgattagctaagttaggatgcaaaaagccacacactatagaggaaatttaccctggaataaatgtagatcatttagtcaaattgctatgttctcagcatgttaagacttccctgtaagaaagtgccacaggagctttcttagaagtacaagtaaacagaacttactttccaggaaacctgaaaagcatgacctaacatgtgattcaggatcagccaacatggccttggaggaaaagagcccctaaaaaaagaaacgtcctgactgagtcgtgaaactgatcctatagggggttttatgagtcaaaactcttggttgcaaatgacagaaatcagattgaagcctaatcagaggcatcaaagtaggggaggggtgggcagcacaaattactgtctttggcttgactgcattgcatattggtataaatttgtgcttgctggagttggacagagacccaaaatgttttcagcgggtctaaatatacttcaaagattctgaacttaaaggggagtggaggaatgtattggctcatgatactgggaacaggcatggcactaattcacaactgactgggtccggtccagaggctgaaaaattaccactgctgatcttgcatcatcaaccactctcgatgtctgcccctctctttgtgggcgtgttaacttctgctgcacctgtgcttctcccgtattgctatggaagagggacacaggcatctttcactcttcctagattagtcagccctgggtcaggtatttatgaacaatctactactgcataacatattactctaaaaattagcatcttaagacaaacatttatcatctcagtttctgagggacaggaatctgggagcagcttagctgggtcattctgactcagggtctttaatggggttgcagttaagatattgcccagggtgtccatcatctgaaggagctggagaaaatgcttccaaactcattcatgtggctgctggtgggaggattcagtgccttgccatatgggctctctgtggggccattcacacagcacagcagctgatctcttcaagagtgagtgatcagagagtgaaagaaaccaaaatggaagccacagtgtcttttataacctcatatcagaagtgacatatcataatttctgctgtattctattggttatacagaccagccctggtacagtgtgggaaaggactatacaagagtctggataccaggaagtgataatcagaggctgtggtaggaccactgcaggcagaactctaaggtggcccccaagattcttgcccccaatgtacacactatgtaattctctcccttttaatgtgggctgcacctgtgaatatgattggatagtcactgctttaatacggttacctttcataacaaaggtaaaggaattttgcagatacaattagcaatagcaatagatttttgagttaaccacaaaagagattatttgggtggccctgaccaagtccagtgagtcctttagcagagactcaaagacttaaagcagtggcccctgatggccttgaagaaagaaactgggatgatgtgaaatggtgggtgtctctagggtctgagggcctcagtgctaccgctgcaaggaactgaattctgccaacaacaagtgagcttggaaggggatcccaagcctcagatgagactggaaccctggctgacagctggacggcagcctggtaaaaaccctgagtggaggaccaagctgagctgtgccaagatgcctaacccacagagatagtaagataataaatgtatgccatttacctgctaaacttagggcatttcgttattcagcatataaacatatataatgcctgcttgtgaaagataagggttaggtgaaggtcttctctgtccatatttcctcaaattgtgaattgtggtgaggtccccaaggaaagaaagtgctgttagagggacaaggggaatgcaaaggctgctaggcaaacagtctacagctgccgcagtttattagggtgtttcaaacctgggcatcccacccggttcgagaatatgtcatcaagcaaacagtgctctccattgccgtctagaacattgttctcaaaatgtggtctgtgtacaaccagtgatggaactctctggagtgtttgttaaaatgcaggctcctaggtctcactccagatatattgactcaatctctatggggatttgtatttttatttatcatttcatagtttttatattttgaagatttttcaaaatcaaaaaaagttgaaggaaacagaagtgtgagcatttgtttgcctctcactgaggttcatccattgttaatattttatcccattttctcctcatatacatatttatgtgtataattttattgcagaaccatttgaaagtaagtcacagtaatcatgacatttcacccctaaacactttagtacacatagcctacaaataaaaactacctcatataatcacatgcccttctcacactgtagaaatgaaacattgatgtattagataaaatacagtgaaatttttccaataggcctcaaaatgccctttggagtattgcttctcaaaatttgatccttggacttgtagtatagcaccagcatattttaataagaacccagtgaatgacaagcacacccatttgccctgtagcaagtttttgattgaagatctaatcaaagattgtattacatctggctatcaaagttttctttactctttaccatctctgagctagaatagtccattttttccctattcttccttcctctgctgcctgcctccccctccccattctaccttgatgaaaacaatcatgaaattttaaaacactctcatgcttttgaaactaaccacataaagttgtataagtgcttaatgactggtacaagcaagatggagaggaatcttgtggcaagcgagatcactaaaagttgacagatttcatgaaagacgtggcatttctgtagatcttaaaattgtagaccacgttagtttcttttgactaactagtctaggaaacaaaggacattcactttaaaaggtaagctggagccaactgaggaatttggttcaaaagcaatcaaaattttaatttttaaaaataatttccagactcagaaaaatgttaaaaataatttccagactcagaaaaatggaggctacttaactgggcacagttacctccaggcggtgggactagtgagttccaatattttagtgtattttatgtaattcctttgcaaaaaggcattattgtaaaattctgacttgcattataaatttcatatgaaaattttccataacagtaaaaatccagcattaaaaatcatttcataaataatgtacatttgcatatcatagttttctttcttccctgtcattggacatttaagttgcttccaaatcttcactgcaataagaagcctgttcatacaattattacttctctgattattataacagagtcctaacagtagagttgctgagacaaagcttacaatagactcaaactggagtgtgtgcccaactcatgcaaattcatttgcaggctctgatagtgccatcattctcagtcttaaccctgaccgttctgagccagtaatagaatatctagattcaagttgggtgaaaagaaacctggaaagctgacatacaaacagggaactctcaggtgaggatctggtgcaaagatatcaggcttctaagctgggttttgatgttgcttctcctgttcctctccttcctgaagctggtttatgtagcccttccttaggttgtgtgagcaaccttagaatccttccctcaaaactccatggtttgcttgttattctgggttcctttctgttgccaacaaaaaaagaaacccccaaataatattgatggtggattgtatatgatagacacctatagaaaggtaatatttggaattagccattggacttcattggagtaaaaggcagtaaggctcctttctgcattctggtgcagaaatttaagagctcatggtaagtgatggccaaacagctagtacatctatcaccctcaggcaactgggcatctctttggaagtgaaacttcaggtgtctggatagctgataccaaaacgaagagaatggaggctgatgaagcatcccgacttcataaattatgtggctaattctggtccagagtcacatagtcattaagtagaggtgacgtgattcaaacccacacaatctcatgtcataaccttaattctcaaccacttctttttattcccttgcaaaaagcagcaaagtctcttttatatgaaaagaagtgaatgccaatggctcttacccatagagttgtcagatttagcaattaaaaatacaagattcccagttaaatttgaatttcagtataagtatgtctgagggctaggatattcttgtactaaaaaattattagtttatctgaattcaaattcaactggacatcctggattttatcttgcaaccctatgtggtccaaccctatatgtcttttcagtgttgctctctcagtaaccaaaaaaaaaaaaaaaaaaaaaaaattaatttaaattcagcacatacatgcctcagaggatagagaggaaaaaaactttttaagaggaaattttagaaattcagatctcgctgaaatcattgctatagtactcaccagttagtctgtattcaatgagctagcctaggcagccagctttaatttcaagtttgatggcctgatgagtgcaaaccattgctgaatgctgtcctacgctagatgacattgaattccttccccttcattatgctggggtctttttggctcaaaagattgtaagagctagtattgatttggacacatgtatctgtgtgtctctgacccacctatctctcattctgttctgcttcaggacccagaagaatcttttcttcccatgggaagtaaattgcgaaggcaggccacagaatcctttaaaatgcacattactgttcttcataggccaagactgtgaagtgggagggtgcaatgaaaatggggtttctaaatgagcagagttaggaggagtcatgctgaaaacaggcaactggagactccaagtgggtgtagtcacagatccaaaggcaatgcaataatcagggctcaggaaatggtcagagaagcagaagtctctggcttagattaaacatggaatctttgggaaccaaattgatgagccagcttttaaggtctgtgtttcagttttactttttgatacaaaacaaaacccaaaactttcattgcccaagtgtcatcagtgctgtatcaatgctgagaaactagatgggaataaggtacgagtatctgcatgtatatcgttcagtcctttgaaaatagcctaggatgtggtgttgcttctgatcaactattttaaatgtatgaggtaaacaaattactgccacttggctctcctattgtaatagactttttgaaaaaggatggggagctaatttgtggattcagaaagttgccaaggatagacatccatccctattatatactcagagacaaatgttttaattatatcccacaaggcctattatgagtcactttaactgacgcacaggtataatctatccaggaaaatagtatccaccaagtatttgcaacagaggggatttaattcagggaactggcaaatgaaatcaaagatggtgaggagtgcaggtaacagcagaacgtcactttcatgctggaaggatgctatgggatcccaggggtgaggtcaccttatggaagctggaatggcagatctgcccatcaggagcttgagtcatggaaaagatggagctggtgccagaaaagctgtccagcatatcatgacttaatcaggtggtgattctcactgcaactgctgttccatatgttgtcccctcattggagcaaattaatgcagtgactaaggcagatctgaatactgaatgattcctgtggcaaatcctaatagaattgcaataaaagtttctagatcttggagaaaggctttgctccctttagcaagtaattaattattcttttcagaaaatgtatctgagtgagtcagtatacagtgcatgaagatgtttgagttttagattctatgatcagggatccaggatccacaagaaagacagggacaaagttgaatgtgcctggccacattccatcaaacccctaaagaataaatgagttgcatgagcagattgtttacatgcccactgagcccaccatactgctgtttcatccacaacctgtgcttgtggcctcatggggagtccctttaacaagctattgagtacaaaggatgacttttcaggataacaactaccactgactataagtagattttgcagctttagagtctctgacagggctaaccctaaaagacgatggagaagggaaagcctcccattaggtagaatgttgggtaatacatgtcattgtaactttacctgaatgaagatgaggcctaaagtcaggctctgtaacaagttcttgggcatgttggtcaagaacatagaagaagattgactatacaattaagaaaaaggatgcaatcatggaacattcaatggatccagaacatgagacagttaaggagtgtgttgagcaagcatgaaaaggaggctgaactgacctgacggtatgaatgcgtattcatgtgattgacagctgctgcttcggactttctgatgagcatccagatagaacatgactgaggcagccacaaaagtagtgataggggctttgtacagactccaccacacagtatttccctcatcaaagcagaccatgctaatacagtagctgagtgatccatttgtcaaccttagagaccagcccacatctctgatatggcatcatacctagtaaacacagtgaactccttgttgtattatatctagttgctctcattatggaagggaacagcattctcttttcctacttcctccctgttgtgcccctgccagtactaccaattatgaactttccaaatgcttcatacactatcttgttatcccacccaaattggctatgaggggagttatttgatcaaaaagaaagaataaaggcaatggactaattaaaatgtaattcactgttttatgttccctatttatgaagtagttagccttatgacattgtgcaatggtcactaaagacagcaccgcaatctcacaggggatcttcttccatctgatgatgtagctactttgtagaccactggttaggcactgaactagtgtttgaaataagaaatactttccccacaattaaaagacatggatctaggaaccaaggagtgaggagggactgatgtgtctaacaatgataactaattaacctattcccaaaatttttacttgctgtccttcttagggtgacccatctcttgttagtacttaaggaatgctttcatcatgtaatatatactgtgattcttctaaattggaagctaaaactggtaatttgggctcttcctgctaggggacaacaaatggcagaaagtgggatactgtgttggctgaggtgactgaccttgcctagtaaggggagatgcaatactgctgtacaactagatctaagaggaatgtgaaaggaactctgtggatccttacttttcctcatgtgctcagtgggaaagattaatcaaagatgattgcccttctatgcacaagaccactaggaactggaacagctcaagaaccaaggttcaggttattccattaaaaaaaaaaatgaggggccggccaaaggtaaggagattacattatgggtaatatcaaagagaatacctaataccagttctgggttctggcttggggataaatggcagaaagatctgtttccttgcttgatgtgtcatgacttagcgcaaaatattttctctccatattttacacacagtgtgctggtggtggtaaattatgccttttggaccagaggttgaagcggatttgaggggaaatggcatttccaagagtagtactattcaaagtggggggtctgcagactgatgctggtgtgtgaactgtttattactggttcatgatgagagaaatgcagaactagagtatttaaaattatgctgtcaaggtagcattaacatttctatgcctattgtatatactaataaaaactgaggcttgcatttgatgttaatttcatttttctagcaattcatttttattacattttcccaatgaatttgtccatgacagattagaaacaaaagtttactgccgctttgctacttatagtttgagaaacactgatcttaatgagcagtggccttgtgaaatatattgtaactcccagatgcagcagctgtgggtaactttggtcgcttgccactgtgaagatgagtgagcttgccatggttcatagagtatttaggtgggttaggtggaggtatctttgtctatgtggaatctatgtgtttgtaccgtcaaagttgaatgaatagaaatataccaatgagttaactgagcagcttatatcttgatgtcctcccttaatcactggatgtcctagtcatggccaactttcccaagagtggaaatacataacgaaagctcaccctccccagaaactttataaggtggaacagagacctatccaggtggaatttgattggaactgagtcactgtatgacagaacccaggaagtgtccagggttcctgtgttgactttcttggaattgtctgggcctttgctctttttggtgcttggtcattcttccttgagttctggagttaccagtgtccttctaatttccttcttgcttatgtcctaaacctatttgttgcttgtcactaaactcaccttaaatgatacaaaaggtcttgcaattttaaaggcatttgaaaaatatcaccaagttactttctaggaacttaattatcagtgtatggcctcaccaataatataagccactgtctccaggtatttttctcagaactgaatataaaatgtatataagtgtatgtacaaacgcacacacacatatgtatatatgtagcgatacctgtctatatatatagaaatatatatcatagatatctaaatttgatatctatgtatcatatatcatagatatatagatttgatatctatatatcaaagatatatatatatatctttgacattctgccaggtaggatattgggactttaaaatatttcatatatttgaatattattgaaggtgaaattgtaggagatatgaggtgtcagtacacttttatgtgcaagttatagaaacacatttcaaatgagcttaagcagagggattttattagcattacatagaatagcaggttactggggaagtttgtagaattgaattaagaagcatgggaaccaagttatgaggacatgcttgttggggggcactcatgtgtgctcctatgcacttgactgtttaccatcaagcactcaccctcagccttcctgttcgcttctcatcattgattgatttctttctgttgaagttctctttgtgtggcaggaattattgctgccagcagttccaaatatatgttttctctccacaagcctagcagaaagagcccttgtttaatttgcagtaagtagtactctggcccttcttggatcacatgtccccctcccaccttggacaggttgccatgattattcacacctggattagttagcctatccttagatggagtggtggagcagaccattgtgatcaacagtggttaataatccctccagaatgagataaaacagggagggagagttgtcctggaggcaggatttctgggcattcataaatgtcccctacacacttagcaagagctctttgccttttgggcagatgtattacatattcaaatcaatgttttcaggagactaagatggcaatggtacataagtagcttgatcatataatttatcattcaaattgggacacttttgaaagtaaaagaggctactgttaataattaatggaatgcctgtttgccacaggaaagctgagcaactgaaagcagacaaatgattttggagttgttgcactaacttctgatgtgatacaggtctaacagtagttatgactataaaaccatacacagttttacaatcactatcaaccacttgctgagaggaaataactttttggaaccaggtataagactcacaaaaaggtcaagattcacaaaaagattaaatctacaatgaaataaactatcagcttctccatagtttgttctcaggggaatcaccctggggtggtgctgtgacctgtgagatttcacagtagagtggttagtagaaggcctcaaagtcataagcccaacttaatttagtcttgactttgctgtttgtcaattacaagcttgagcaaattacttaacctctctgaacctcaatgtcttcatctataaaatggaaattataatacttcatgtgattgtgcctagaattatggtgtattactatatgctatattagtatatagcacatatatatatatgtaatgcatatattagtatatgtttagtaatactgaaaggttagcattaatactaccaaaagggttaataaaacgcaagagaaaagagaaaattattgatttttcttttagcaggtaaaatctcctagtaaacactgttcattgattctttcttccatctgtttttacttacgtggtctgctcctctgatctgacaattcctcctgtcaaacttaccacaagtacaaaagaacactccatttgttggccagggaagagtggctggacctctctcatttggtttaaagatgtctttggtttgtcaggtgtgtcacttttgcctttcaaaaatagtttcaggattggtaagaaagaaaaatctggttcaaaagactttgaatagtgagcatggagtgaggagtggcaacagatgtggccccaaataagacttggacggtaaaggtagatgggaattaggatcataactagagaggacaacagggtcaaggaatgttactcagtgtgtgggagcctggggaaagagcccatctgtgaagggccaggcggattagaaggagggctaaggtttagggaaagataggaagggagagaattgaggcaaggaggaattgccagagataggttaaatagggagaagtgtagatgacagaatttctatttctcaaagaaggtggtagctgatctttagacagtaagagattggaagccaatgcaaggagactcattctctagtgactcatgctgggcctggatctcactgcctgagcagatgggggcatgggtaaagatgccccacttaaagaaatcttcttattctataaatcgctcagcattggttacacatgctccctctctcgcctaaatttgccagtctttactaaactcagaaaacttcgttggagaatttctagttatagaaacaaatagaaccaaacaaaggttgacctacctggtatatctgggcagcttgatttatataaacagaccaacatacccatctgttcaaatgcatcaaactcaagttctctgcatttgaaagtctatataccaaattaaagcttttatactctcccttctttagtctttagtgttgaatttataaagttaaggcattgaaatacaaatagttatgtcataagatgtcaaattcatttttcctacaaatatttaagtcccagctatacaatctgaagttattttattaccttatagcctcatttttaaagatctcttgaaaacaaggatttactctttttttttgtttctttgaaagaaagaaagaaacaggggtcctggagagtaaaatagccaaactcttttctttttttttttttttccttccttccttccttccttccttccttccttccttcctttctttctttcttttctttctttcatggagtcttgctccgttgcccaggctggagtgcaggggtgtaatcttggctcactgcaacctccgcctcccaggttcaagcaattcttgtgcctcaggctcctgagtagctgagattacaggtgctcaccaccacgcctggctaatttttgtatttttggtagagaaggagtttcaccatgttggccaggctggtgtcgaactgctgacctcaggtaatccgcccgcctcggcctcccaaaatgctgggattacagggatgagccaccacgcccagcctcaaactcttttcttgtataaaagaaaattcccacatttgcaagataatgcttcagttaatagtattttccttttaatgttgacataaaaataaataggaatttttaagttaatgtggtttttctgtcagaaaactcctataaaaaccataaggcacattaaacttactacaaacttctaatggctcataactaacgtttgttttagcttcaagattaaaagtgtttttgctaccattactaagcaaatgtgtgtctcttacattttacattactctgttaaaatataacacatcttctttcaacattttgttgtgaaaggagacatttgtttttcattgatttatttaaacaaacaaaaaaaaacagagcccagttcttgtgtcagtagctcttcatcccttagttttcttaattaattatcttcattatgcgttactttcaaatgtttggagacatttgaaaatccaactcacagtagtttaaatgtattacttaattaacaggaagactagaggtagaggactcagcacagacaggagcagagactcaacagtgtcatcacaaacccagcttctttccatccatctgctctgtcatccttgttactgtgacttcttaatccccctacttgtttcctcacaactgtaagatagaagctccagctccagacatcaaatcaatgctctgaaagtagagggacggggtttgccatcatgttctgctcttgcatccaatttagaggctctcacttccatcccaagccggacatgctcatctcatttacctttctgaacaatttgtcagttcttttcaatagaggcagtcgcgtcctgcaacacagcttgacagaggagttgttagcaaggaaggagggaaatggtactggtgtctgtcacagtgtccttccaaatttaatcatatcctactaaagtcttcttttaatggtattctattacatttagctagttgatgcttatcggctggctcctttttcttctttctctctttttttttttttttttttttgagatggagttttactctcgtcacccaggctggagtgcaacggcgcgctctcagcttactgcaacctccgacttccaggttcaagtgattctcctgcctcagcctcctgagtagctgggattacaggtgcctaccacaatgcctggcttattttttgtatttttagtagagacagggtttcgccatgttgaccaggctggcctcgaactcctgacctcagatgatccacccacctctgcctcccaaagtgctgggattacaggcatgagccactgcgcctggcctggctccttttactcaaccactgtaatcccactggtgtgatctttctaaaacacaatctgacttcatcattagctttctagtatggcttaaaataatggtcatgctgtacccctgggacatctttccagcattttctcttccatgtggactgctgggtattattataatcgcataggatttatgttctctcttgctgctgcatctttgttctattgtctgtccagaataaccttctactcttccttataggccagtgtctctttgtacctcaaacctaatgctttgagaggtcttccttaacaccctgccccttccaagctcaagcgtctttcctgtttccttccacagcacctggtgggagcccttcttcctgcctgcatctctgtattatgatttgtttatgtaattcacctatcttttggtaccagatggagctttctgagattagggactgactcatccctgtacagtttgtgacccgtaggtgatgctgaaatcatatatttttaatggcagcaaggatgttaaaactttctggatgacagtgtggggtaccatacaaagaatgacctagtcctgtttcctaggaggtcaagataagttggagggcattttattttttcttgtttctcagaacttgaacctttcctggctctaacttacgtatggattatgagtagaagacaaggcttctgaagcaatgaagctttacaaaccaaagttatttggaagaattgactctgagcaccaaaaactcactggtacaaagccagcatgataaccactgtacttaggaaatgactcactgaactgcatacatagaactaggccaggagattttcttttcttgtgtaccagctagtcaggttagcaaccgctttaaattctgaggactgatagccactaattcagatgtacataggtgcaagtacttgatagaaagcagtctattttaaagtatcacttaataaaagctctaagcagtctatgcaggtaggagtaagtcttataaagattggatttgcctattcttcacaccaattccttgattctgatattcagttacaggtcacccgccccagcaccttgatatgtagatacaagtaggcgttctttactttgggatatgaaaagatgacaaagggattgagtgggaatgattaacctcatactggggaatgacgattgctggatatatcacttaccacacaatagatgtatttaaatgtaacagctgtaaccagcataggatggaattctgatatcaggagtaggtgataaacttaaattgacattggaaaagaagtttccagcttcgtaattcagttagtccagatgttttgaccccacagactgttgatcctcctcaatgttacagaaacttggtcccagattatgtgtgttgagagttcactgtatcattgtagagctttcattacttcagtggaagtccttacatctgacataatcagatgtgtctagttaaaaactagttagtctagctaagaaaaagttattcaaattatacactttgaatgttttaaacctaaacataaaagtccactcattttctagtcttttgggaaaaacagtcaaagccttgtcctgagtatggtgccactgtttgattttttttttcctgtatccatagaacaatttaatcaataatgcattattcagtatttccagtttttgtttcttaaaaatggccagagacctttgcattcaaatatgtacaaaaaagtccagttcctcctaggctctacaattggctttgaatcttttgccattgtctctcccacacctaatacaataactgattttttttcatctttgttgtgacttgcttttatttagcttttccaaagcattcatcttattcaattagtcattgaagatagaccaggtttggtcttgtcctcccatttaatcaattaacataacattttgttaaattatttgatgataacccactgaactgcagggggtagaagtgtacagaaagagtgcactggctttccagaagcacttggtgtgccatgggcatctagcaatatgttttacagagaaaaaggtgactaagaagtccttggcctcacatgtgcacatgttcaacactaactttatttaatggagttttgttcaattgctcactaccttgatgtattcgacaaaatgcctgctgtctgccgtgttaaccctggcaatttcttttgtctgttttcttggctttgcagcattcttgctaaacaacaacaacaacaacaaaaccccactctgtctagctatattctttctgatatagagagctattaaggaggattatattatctacccatttgacaagaagaaacatttcgtgattgaaggctgagctggaaaatggtccctggaagcaggagtagttccctggactttaccccaccttgtgtaatgtggattcctattcaagtgcttcatcctgggctctgcttccagggaaccaacccctcccaagatggggaattgagggcaagtaaagagagcagtgttctcattaactgtatgaaagctgtaaggaagattgagaaggaggatgacacagagaaagatgctaagaaaaaaatgtggcttcaggtgaaggctcagcctgaacccaagggagctctgggctacaggatgtttcttgccttgaagccaccactggggcagggagttgcaaagcaacataacctgagaactgcagcttccatcatccaagtacaatcctccaaagaaggctgaagttatgtgagcaggtagcagcagctaagcaacacatgtgtgaaaactaaattgataaaagcagtaaaaggggatctttgtaggtgattaactgcaaattcacagaatatcagatagtaaatgtgtggtattgttaaaataactacttttattggacccaatttacgagcctccctaaattttctgggtttctcttgtctcttgggccctcaactggttagacaaaaagagaccagccccaatttccaaatgtcaccagctgacccgtctcctctgggaaagccaacttcaacatgtcctctattatgccttcctccttgggaagtgcagcagctgcagaatccagacatgacccaaggaaacacacagactgcggtttcacctttcacctgtttccagactcaaacacaaagcatcatacagttaaaatgccacacagtaaggcatggcatttggctttcgtagtgcttttcccaaggggccataggcacaaccaggaagagcataggagctaatgccaatggggaaaactttaaccactggggggcaacttatagataaattcctttttgctctcttcctctgatggattgttttgagctgctgtggttctgtggagcatgtctagagattgtcccttgtgactgagcaggtggctctattttccattctgaatctgtggctggcaaagcaagcaccacctagtatctgttttccattcttccttgtttcacttccccttttccctcactcttcctgccctgcaattgcacctcctcacctcccccaaaacgttagcacataatcttagcttgatttccaaaatcaaaaataaaaacacaccaaaacagaaccgaaggcaaagacagcacccctagagatcaaagtttcagtacatgtacaaatcccctaaatggtgggatttcactgtgaaacatcaggagagatattttgagtaaagagagggtaatcctgaaattgttcttttgttctttttctgtctaaacagtcaatcttattaaaatctaagtggatgctaaggaacatccccaggatgctacaaagagttttcctttgttaagacgtcttttacaaactagctcggtgtcatgagcactgtggtgaggcacagaaagtaaaaacaatgcagaggagaatgtagcaacctagaagctgcttttcctcaaaggagtgcagaacattcatgaactggcataatgatgagagtgatgcaaaacattcttatgtttcaaaaaagagaattgacctgttcttgtggctctggtcagattgagaccagcagttatgaggccaggactagtcttttaaaaaatatattgacagataacattatatgtttttatcgtgtacaacatgatattgtgaagtacacatacattgtgaaatggttttgagcgttactaatgtgcaggctagagaatctgtcccaactgcaagtgatgtttgcatcatcatgtcacaattagtactgatggctgtggtcaatttagtctggagctattaagatgggtatgggggagctgttctgttttcgctattttatgcttgtagaaatggcctcaattttctcttctgtctgattagtcttagcatatggatttcttttttgccatattctattgcagaggctgcctctctctgcctttctccctcacatctggaatccagccaaaagtaccagaacaagatgcttctcacatttgggcccttttgtaagggtgctgattgcaacttgggcaacttcagtataatctaaggtggaagctttctgctgcttttggggaaaaaaataagtgtctaaaaataaaacctaggcataaaaatagggccaaatactcattaactgcctcacttagctgaatgctgaaattatttcaacagcactaaatcaagcctttgtgtagaagaggttgggcatttttttattcataatactttatcttagatgataaatgggttactgtaatttctcactttattcaaaacatgaattaaatagtcctcagagactcaatttttggctcatgctcatgctgacccttgaattggagcacttgtgttcacaagtctccaggaatgtattttgtgggctgctgtgggaaaggattgggggacagacaggaccaggagtggtggattaaaggcttgggatgctagggttaagaatttggatcttacattaggtgtggtgggaagccactggagggatttaattaggagaatattatagaatgacttctttttttaaaaaatatgactcctgactgctgtattgacagtggattggaaggagacaacagtaggaaaagggtaaccagccgaatgcgtatttgtagatatccaggtaagaagggatagtggctttggagcaggatggtaatggtagagttggagagtaggcaaataatggagtttatctaattcattaacaacaacaaaaagattggttaatagattagatatggggcataagagaatggaagagtcaagattgatttctaagtttctgacccaaacaactggaagaatttggtactaggtgagatgaagactggagaaagaacaggatagtttctgctgttttgttgtgtttggggtgggtcatagagaaatggaaaaggaaatgaggtggaaatggctcatgttaacttagggaatctaaatgaacagttcagaagaatagttaaacatatgaccttgatccagtagataagtttgagaatccttgatgtacagattatattcagagtgtgagatgaactcgcctaaggagagaatagagagaaagtagaaaacctggtaacattccatatttccacataaatagggcaagcagaagagaaccagtaaaggacttagaaggaacagcagtaaggaaagaaaaactaggagagtatgatgttccagaaaccaagagaagactcttaacaaaggcaggtaacagtcaattacattaaatgctgctacgaggttgagttagatgaggacaaataatatcactgtttttggtgttcttggtaatactgacaagggcagtttatgacatgtcatgcagaaaagagccgagagttggtaggacattttaaagtgggaaatgaagacagctatttagacaattatttcaagaaattaatggagctgagaaatagataatcaagagtaaggggagaattttttgttttttctcatgtttctaagatgggtgattggagcttttatgcctatagaattgattcaggagagagagagagatcctgatgatgtagtagaaaggaaatatgattgcagggacaaatttcttttttttttttaattatactttaaattctgggttacatgtgcagaacatgcagttttgttacataggtatacaggtgccctggtggtttgctgcacccatcaacccgtcacctacattaggtatttatcctaatgttatccctcccctagccccccaccccctgacaggccccggtgtgtgatgttcccctccctgtgtccatgttccactcccacttatgagtgagaacatgcagcgtttggttttctgatcttgtgatagtttcctgagaatgatggtttccagcttcatccatgtccctgcaaaggacatgaactcatccttttttatggccgcatagtattccatggtgtatatgtgccacattttctttatacagtctatcattgatggacatttgggttggttccaagtcaaaattaaaagaactagagaagcaacagcaaacaaattcaaaagctagcagaagacatgaaataactaagatcagagaagaactgaaggaggtagaggaacaaaaaacccttcaaaaaatcaatgaatccaagagctgttttttttaaaaaaaaaaatcaacaaaatagatagaccactagccagactaataaagaagaaaagagagaagaatcaaatagacacaataaaaaatgataaagagggtatcagcactgatcccacagaaatacaaactaccatcagataatactataaacacctctacgcaaataaactagaaaatctagaagaaatggataaattcctggacacatacaccctcccaagtctaagccaggaagaagtcaaatccctgaatagaccaataacaagttctgaaattgaggcagtaattaatagcctaccaaccaaaaaaagtccaggaccagatggattcacagccaaattctaccagaggtacaaagaggagctggtaccattccttctgaaatgattccaaacaatagaaaaagagggaatcctccctaactcattttatgggacaaatttcttgaatacagaaaggtgtgagatgcagagtacagtgaagggtttggccttggataagagcagaaggagagacaaaaagagtgcacctagatgttaatgggttggttgagtcagtgataggaggatgagggagtagccataatcagttacaacaattatgaagtaagagcatcagctggaaaagagatgagaacagggaatgtcagtttcaagagaaggtagcaaatattggagtcattctaggcaatgggaagatgaacctctagcaagacaatggacatggaatgtttcagggttacgttaaacaaggtgaatttgagttaatttttgcttggaaagagacagtaattaaatttcaaggttttttttaatggcatatagaggcaaaaggtattattacatgtttacatattttcatagtagaaaaatgagtttaatgattacttgtaatcttactcttccaaaataatcattgtgatatccttttatatattatacatgcaaatacttccataggaagaaatataaaggtctcaattttgataactaatactattttggagcagttttgactttaccaactatcttagttattgctctaagagaaataaaagcaattggactcataactttgtcatattgcaaaagtatttctatattttgttgctttttccatttttatagagataatagaaaatgtacagttttgttaaaaggccttcttcctaaggtcgtgttttcaataactttcttatagtctttaaaatgtaaaaatgaaactctaaattattaatctaccaggttttattttgataagatgtgatgaaggaatctaattttacttttttaaaaaaattgttattttaacaggagttacatgtgcaggcttgttacatgggtatattgcatgattaatttcacttcttaaaatagtttcaagtcattcttaaatcacatacctcacaacaaatatagaatatattcttgtaatagtagagctcctaaatggtatcttttttatttattttattttattgttacttttttgagacagagtctcactgtcttgcccaggctggagtgcagtggtacaatctcgcctcactgcaacctccacctccctggttcaagcaatttgcctgtctcagcctcttgagtagctgggactacaggcacatgccaccacacccggctaatttttgtatttttagtagagacaaggtttcaccatgttggctaggctggtcttgaactcctgacctcaagtgatcctcttgccttggcctcccaaagtgctggtattacaggtgtgaaccaccatgcccagccaccaaatgatacctttaaaactttcttttagagattttaaaaccaattgtatgctattctttaaacaagctatttcttacagtgtaaaaattaactttaatcctatcatctgggaaaatcagttacattgtacttgcttgaaactgtatttttgtgtatacacgttttgccatctatattttctcacttttttgagtttttgaaacatgctttgtaacccatgaatttaatggcttgcactagtattggatatgtaaaaatatattttcaggttttagttgttctttatgtgtgattataaataacatcatagtttacaccactggcacttaatattgaatttaaattggttttagtattttctatcataaaagcaaatgtgtccatgtagaaagctttaaaaataacaaattattatccagagaaccactgttgcagatatactaaatctttattcattcaagagccatgtttcagcacctgttaatagcagtcactgcttcagatatgaaacctgctcttcagaattaacatcctcatatacttagtcatatatcttgtcagtatcctatgatcagaaatgtgtatgttttaaaaaaggaaccatgctatttagaaattgtattgtaatctaatttttctccgataacctattaagaaattccttccatgccattgaaccatcctttacaatattatatttaatggccacaaaacaattatttgtatgaatgtaccactcttttccaattcccttttgcattttaaatccataacatgtgcactttacttctctttgatagcatgactaatatgttctgcacaagacatgaaggcacagacagcactgtctttcttcctcattctcataacatctctgagtggatctcaaggtaatttcgtttgtaatacaagtgttagttatttgcattatcagatagaaacatgagcacacaatgcaaggtggctatttcctccatagccacagcatcgtgaactttcctaaatcatcagttaatcagaagcaaggaacaggctggaagtctgcatgaagactaaaaattatatatattttttctgtccactctgattaagactctttctaatctgttgtctgctaccagaagtaagttcactggaaaggcaagtttgattgattgatttttttttttttaagtgtaagcttggtacttaccacttgacagaaggcattatcagctttgctaggtcctatgacaggcattcttaattatccagtgaaacattagaggggtttagcagagcaattagagagatcgacagtcactcttttcctttcccatctttctgtgtctttctttcagcatgatgccacatccctctagctctctgcagagagattaagtctctctgaggaagagaggcgggacatggtagggtagaaagagccccagaagggaaggtagaggataaagactgtgacagagccacttgggcacgcagttcttccatcttgggtggcctgggccatgagccaaaggagttactccattgtccaaaaaataaggtcctttccagtgctaatatcttagaatccatagacagggcacaagatctacttaaaatattttgtaaatcaaagcagttagattacctccttcaatgataggaagtgtctgggtatattttctttgcaaaaatctcttattctgttgatttcatttgctttttgaaattaacttgtgaagttgacagtgaaaagaaaacaaaacaaaataagtaaatcaagagaattggggattaggcttccagatttatctccagatattccttacctacattttgaccaactcaggatatcctgagagcagtcttaaactcaaagcaaatgaatgactctctttcccttttggactcctcctgctcatgtccttccctatttagatctagtgtacagatatcagattcctgaacccagcattgtcttctatgtgctccaaatattttcttacccagtcaagctgagtttattccattcttttagggcctgctggctgttgctagctggataaactaatttattgttgctatagtaggagttaaatgtgaatgtgttctgggaatgaaatccaatggagtcttttaacatacatgatttccaggccaggattggaagagagataagattattgatcaagtgggcagcaaaccagtgtttctatgccttgggctgttaccagttctcccagttacattgcataaaacagatattcaattaaaattaaaactcaaacacagagcttcacaggtttgtttctaataatcagacaagtgtttttgattatgtggtctactaataatcaggctgctaacctaggatagttcttctgggtagttctggtataatcctgaacaagcacatggcattaattctctttataacttctctgctcttgactgtaggcatattccctttggctttcttcatttatgttcctatgaatgaacaaatcgtcattggaagacttgatgaagatataattctcccttcttcatttgagaggggatccgaagtcgtaatacactggaagtatcaagatagctataaggttcacagttactacaaaggcagtgaccatttggaaagccaagatcccagatatgcaaacaggacatcccttttctataatgagattcaaaatgggaatgcgtcgctatttttcagaagagtaagccttctggacgaaggaatttacacctgctatgtaggaacagcaattcaagtgattacaaacaaagtggtgctaaaggtgggaggtaagtgtgcatgtaaagtttcatgaaacagcaatgacatcattccatgttattagtaagcgtctttttcctaatatgccatgagcttccttccaagtcaatacatggaaatctacttatttttaacgcacagcaacttgtagtatactaatgttataaatgatacaactgttcccctgttggtgggtattcaggcatttccagtgttttacattacatggttgtgatgaacatccttataattgtacttaatactgggaaataatctgaaagcaaagtaccagaagatttaaatgggttactgatactagcagcataagactatccactttccccttagtcttatcagtaccaaataactgccaatatcatgactgaaaaaatattgaattgctgatttaaattgcatttttctatattataaatgaggttaattttatattatatgctttccttctctgtattagctatatataacactatacctatataactataagccattaatatagttaatacatacagttatatacagttaatatcactcagacagagcttcatggtggttatattatacagttaatataactatataatatattaactgtattaatatattaactgttgctaattctcatagttacattgaaccaaacaggtattagattaaaactgaagaaattcaaagagcttcatggctcctaattaccggattaccaagagttcctgatgatgtgctctgttaatgatcaggctgctgatcatttatatgcaatatagttagtatgcattataatatatagaacaatcttacatatagatatatatacacacacacacatacatgcagtattttctaatgggttgtttttcccagcacttgtttctttttcttctgtcccttttagctgcttcagaccttgattcagaaatcacaaaattatgtgtaaacagtcaaataggtgctctgagtcagtatttgaggagtgtagagtgccgcatgaactctactttatagacttagacatcctcattttggtttttcaatgaggccattagatttcttttccagctatgtttctagaaaattgagattgctagttgccacatacccatgcctgctctttttttatttcttctagataaccacactatatcttaaggttctacagaggtgtgtgtttgttggtttgttttccctttcagtaactgccaagttttgctcataaaatttagcttttcatttcatggatattaaaaagtattctgcacagacggcctataaagaagctaatgatggcagtttttcatgcgcccttctttctcctatgtagtttttctcacacccgtgatgaagtatgaaaagaggaacacaaacagcttcttaatatgcagcgtgttaagtgtttatcctcgtccaattatcacgtggaaaatggacaacacacctatctctgaaaacaacatggaagaaacagggtctttggattctttttctattaacagcccactgaatattacaggatcaaattcatcttatgaatgtacaattgaaaattcactgctgaagcaaacatggacagggcgctggacgatgaaaggtaggctccacaggactttctgtgtacacgtgctgtttcaaagttggggggtaatggggactgatttgcaaaaaaagaaaggaagatgaaagaaaagaaagcaaatccatctgcagcggttagaagaccaagaccgaagccctagggctggttcttctggctgtattacattaagcaatcattcttacttttgagcattagtacctcattgataaaatagaagtaattcttaccttgctatgtatttatgagttgagtgaaaacattcatgaagtggaaagaagcaaatctattcttgaatattaatgtatttgtcaatggctcatccttcaaacaggattttctaccagcattgctctttaaaagatcaaaggagaaagaatacttgtctttcagcagatcacaacttccaatcttacaattaaacaaaatattaatgagtattattgcttctttttagtttctttacatagtattagcccatcaatctttatccaacacctctatcacaacatggtcagtttttagcgctcgttcctctcatttatttgaacagatccaaactctgatcaatctctatatccaaaacctgtttaataaaaagtaatttgctatctccatatccaagtccaagaaaatttgttttccttttttttttttttttttgagatggagtctccctctgtcgcccaggctggagtacagtggcatgatctcagctcaatgcaacctccacctcccagtttcaagtgattctcctgtctcagcctcctgagtagctgggattacaggcacatgccaccacatgtggctaatttttgtatttttttagtagagacagggtttcaccatgttggtcaggctggtctcgaacttctgacctcgtgatccacccatatcggcctcccaaagtgctaggattacaggcgtgagccaccgtgcccagcctgtttttcattttattagtaacaaagcaaaaattttctgtcagtctcccttatagggggaaaatggaggttatctttttttttcagtcttctctttcctagcatctcatattctcaaaatgctcaccaaaaatatactgaaattgtgggtgattcaccacatttacatgagtccagtgttaaaggcatgagtacccaatgttcattctccatcagtcaggcagcaatggaaacatgggaaagggttgcaaatgttaatattataaatattgcctttggaaaatcctaatttctcatgttcatttagaattgagtgtcttgaagcatgaacagttctttaggctcagtactgtttggtctcattgaaaagctattacgtgccaagttttgttgctcacagactgtgaacttaagaacatggtctctactgatttctggatccacagcatctagtacaaatataaaaattaaactaggaacatagcttacaaagggagtgattaattctattctctgtggttggacatgaatggggttgtcacagaatatgtgcttaagaaagttgcataagggtagaattttagaagagtagtaggacattccaggagaagaagaatattccaggtaaaaagcacagaaaagtaaaattgcctggatttgtggaatcaatggatcaagagatgaacctggagagggaggccaaaaacagatgaaagaccttttacacgttgctaaggagcttgttgagtcttggaggtaggatagatcagaagagggatttgaaccatcagagaggccctggatttgccttttggagggcttactttggcatcactctcctgcaggtagactggaagccaggtgagtctagagccagggggaacagtccatgacagtccatagaggtcagcctacaacactacagaacgggaaggacaagatggagctgggtctggaggggcaagccaagaaaattcagcagtctctctttaaaagagctcagtccagtgggggttgcctgcacacagctggaaatattcttatatgaagaaaaagagattttgtctagaaaaagagattaagaagtagtgaggccataaaagttagagaccactagggagtaggtagggtaccaaaaggggtgttctggggaccaccagcattagaggggccaagagaaggagaacattgagtttaataggctagtaactggtagcaacattcctgagtgcttactgtcaggttctaagagttaaaacaagtatatcacccctctagctggccctggcttagccctccttgaaggtctaaactaaccttggtgggaaactttaaaatagtggtagtaaaacttgtcttttaagaaaccacagtacaaatataattactttccaaaaagttatttccaaatatatcagtattagtgcctttgttctctgctttctaagtgtaacttagagaattcttttgaaatgtttatcttcattgatgttttcttttctattgtgttgttagatggccttcataaaatgcaaagtgaacacgtttcactctcatgtcaacctgtaaatgattatttttcaccaaaccaagacttcaaagttacttggtccagaatgaaaagtgggactttctctgtcctggcttactatctgagctcctcacaaaatacaattatcaatgaatcccgattctcatggaacaaagagctgataaaccagagtgacttctctatgaatttgatggatcttaatctttcagacagtggggaatatttatgcaatatttcttcggatgaatatactttacttaccatccacacagtgcatgtaggtaagttgcaagtaggtttggataatgggttttggctgtagcattagaggtttgtgaatatcaaagagaaaattaggttgacttttcaagaatacattgataccctctcaaaatataatccacagggatatttctggtcaggatgtcgattaccctccctccttcaaccacacaaaagtcctgttttgaaaaaaaaaattactcccacagatttcctttcaggattttggggcttcagaaatgaggaggaaacacattttgatgactccatgcgctgagcatcttccatttctgctcactgctgtgcctaatatataccttaggcctagggtttggggattcaaggctagagacacattaggaagttacaatcggggtcctgaagaatgctgggaaatcatgacagtgtctatgaacttggaaatagtcaccacacaatatttgaagcaccaagtatatattcctagttcagttcatttttacctctgttgatagttcactgccaaaaaccattatctaaaatatttctagtcaactaaccatcaagtcatggaatatatactcatgaagctgaccttctaggtgagctggatggtcccacccttaaactatcaacttcacatcatggcagaccatggcagctctttctgtccttcaataaaggtatttgaaccagtggaacttatgttttagaaatatttctatcatttcaattgtgaaaattaggaggaataacatttgaagttttggtgattctacgtagtgagatttggagacaagagcacagagttgtcctttaggttatgtgatcttcaaatacttggaagcttctggacattgagtaataacactccctttgtagagctgccactttgagagtagagaatgaaaaactggggctgcatttgaagctcctatttttctccaaaaataaaagtgtcagttttatgtaaaatacagttaagcctgcaatctatttttaaaaatgttgcctcatgttggattaattttggagtgtaaaaaaaaaaatagtcaagaagaaatgtcctaaagactacatatggcccgtcttcccacccagagatctaattttcagttcacacaaagtgaaacatcaggaccattccatctctgacaaaagagtattttcagaacctctcattctcaaataaatgttggccaggtggggctgggggagggtgtgctcacccttccccacgaggaagaggacttggcaggagccaccccagcaggccagggaacagggcaaacagtcttggtaccttaaatatcatcctttcaaggatgacttttccatttgttgcctttcccaggaggtgctacaacaagatggggggtacttatgattcctcgaatctagatctgctcaattaaggttgcaccaagctgaatggaattaaataatccttgctaagttctgctgctgaatcaatatgtgaccttgggcaaatatccttacagatgggggaacctgagggtcacgagtacagtgagaagtagctataccttgtaggatttcctttaggaggaagaaaaatgcatatgaaaaccctgtagaaagtcaacctaacattcctacttaatctctcctttatataggtacagtagtcccccctttccttgggggatatgttccaagacccccagtggatgcctgaaactatggacagtactaaaccctatatatgcattcccacatggtacgaggattaatctgtccttccatgtttatgccttggtgcctcattcacacttctatgaatacaggttctattgggcatcttcttccagcagagcttgctttcattgcaattaaagatttgctttagatggaaatgtggctgtagcttcttcatcagcagacacagcctctccagtaatttttatatttttcagtccaagctgatttctaaatctgtgtagccatcctctatcctctacttgcaataaatggcctgtttcaagggatctcttgctgaagtcttcatataagcccaaagctttccagtgcaacatatcatcaaccagaacacatttctgttatgtcttccaccctcaaatttaatgccatttccatcttaactcagcatatacaacacactgtggccataactgttgtagtttgagatgtgactgcaaaactaacacaaattttcttctttctttcttcacaattttacagatagaagattcattttcaccatagatctcagcaacctcaatatatgatttttcataagtcaagggctttaattgttttagttcaaagaagcactttatggcttctttttggtatatccaaattgccagcatcactactcttgtgctttgggaccattcttaaagaaaataagggttacttgaacacaagcattgttataccatgacagtcagtctgataactgagatggctagtaaatgattcatgggggtagtgtgtacaacgtggatatgccggacaaagggcgcagtcacgtcccaggtgggatgcagtggcgtgacacgatatttcttcatgctactcagaatggcacacaatttaaaacttaagaattatttattcctggaattttccatttggttatgtttggactacagttgaccatgggtaactaaaacctcagaaagttaaaccagggataaagcggactcctgcgtggaatttcagaatgacacaaataggtggagagattaatattttattagttgtaaaacactatagtatgttcatagaaaattacatttgttatgtaaaaagaggtattcattctaaaggatagccacaaacattttccccctgaattgacctttgtgctctaatgcttgctgccctcgttttagcagaacatagaccataaggttagcagggttctgactttggtaacccagggtctctggagtccccatttccattaatactaatttcaacaattctagtcctgaccaagatgctggagaaagtttaggctcctccagttatttctgaggagctccaaacactatcagcaggtcctccttttctgcagtttgttacacaaagtcaaccactgtctgaaatttttaaaaggaaaattccagaaataatgttttaaattgtgtgccattctgagtagcatgatgaaattgcatgtcatcccgctccatcctgccttgaaggtgaatcctccctttgtccagcatatcacaccgtggatgctacccgcctgttagccctcctggtaatcagatctactgtcatgatatcgcagtgcttgtgatcaagtaacccttattttatttaagaatggcctcaaagcacaagaatagtgatgctggcagttcagatacaccaaaaagaagccgtgaagtgcttcctttaagggaaagctctcaagaggaaaaaagagcctatgtcgaggttgctaagatctacagtaagaaagaatcttctacctataaaactgtgaagatggaaaaagaaattagtgtatagtatgcatagcgttcagtactaaggtttcaggcatccacttgggggacttggaatgtatcccccagggataaggcgggggactactgtgcctattatctctgtggtcacctgccacctctaactcaagaccagggcttctactcatctccttttatcacctctgaacttaccactgttcccttaggaccctgtcttctctaggccaatggcagactgcactcttacttcatcctccaaggtgaacactgggctgaggctaatttatggacataattattcctttataaaaatgtgttgtttcttattacagtataaagcaatagaaactgaaaatgcataatagatgtattacctctccagttttcagacttttctcccagctcccccacctccaccaatctccaataatattatggtatctgtaggtttcccacaatagatacactgagactaggagatatttatgctcaagacaaactctcctgtccagtctgggctcttggctttatcctaaaggacgtttttattatgcaaagtgttttcatatgaattcagcctcctacctgtaatgcagaaataactagtttttaaaatagtaaacatactccacccttacccacccacacatttcttatctggtaatttttcttccagttcacagactttgtttctcctttttttttttagaaccgagccaagaaacagcttcccataacaaaggcttatggattttggtgccctctgcgattttggcagcttttctgctgatttggagcgtaaaatgttgcagaggtaatagaagaatttgggctctgccccacgtgttccacatcacgtatattaaagataacatggaaatacatgcccaaacagctactgggcatgtaattgatctgaattttctggaatgtcattcacaaaattcacccaaaatcttttaaaatgctcctacatttccacctaaccattctacttctaggaatttatctcacattaaatgagcagaggtacaccaaactatatacaagcatattcactgcagcacactgctattgcctttaggtttcctactattttcaataaataattgggaaattaattaaagatcatactttactttttaaaattttaatctagtattaaaatgataaccaggatgacttaatcatcctgcattgaaaagtaactggaaagaaaaaagccaaagctttaagatgttgcctttggagtgataggaccatgagttcttccttaccctcacacctcagaaggaagccagatacctccttaagcccctgggctctgcctgttctcccttgctctgagtttagtcaaggttggtgctctgattgaaactgcattgttcttttcttatgggtcatttcattttaattgttgttcaattaatctttttctaaattttaggcaaaaaatcttaccagtaatttaaaatatcttaagatgccatgatcatgggaagtacttttagggaatactttcctaaagtactttgcttttagtaccagaattttgagctagagagcatctgggcaaaacttagatctagttgatctccacattttacagatcaggaaacaggaatccaggaagttagcttaagtgccaagtaggcatgtgaaacagatttaggtggatcatttaatatcaccaagccagctaatggtagaggcaggttgaggcccccagaagccctcccttattccattatccccctgagaaggctctgggtgtcctgggaacttgagatagatcctatgtctcttttatctgtccttctggttgatatttggctattgcccctgctgaagttaggagattagggttatagcagaaactattattgaagatacagttttaggggcaatggagagcaagcatttcaccaattctagccctgtgatcattcgtactaataagcaggatagttcctgtcccttggctggccagatggagtaagaccacaggcagtctagcctgtccacgaagatcaaccgttgacctaatatactgatatttgtgattggattaggttcaaattatgggaggtggtgctacatcctactcaagaatgatagtttagtttctttagtggaagtctgcataagtcagttctcaactgaaaacacatggcacactcaaaactggataaagaacttatgagacagtatattcatggctgggagcacccgaatcactagcaaacttaaacttgaagggacaaggacagagagcagttcccaaaacttggaaggagagagtcacgtaagattagttgccttgtaaggagagtgacttacttctttttttttttttctttctttttaagttctgggatacatgtgctgaacatgcaggtttgttacataggtatacatgtgccctggtggtttgctgcacctatcaacctgtcatctaggttttaagcaccacatacattaggtatttgacctgatgccctccctcccctttaccctcatcctccaacaggccccagtgtgtgatgttccccgccctgtgtccaagtgatctcattgttcaattcccacctatgagtgagaatatgcggtgtttggttttctgtccttgtgatagtttgctgagaatgatggtttccagcttcatccatgtccctgcaaagcacatgaactcattcttttttatgactgcatagtattccatggtgtatatgtgccacattttctttatccagtctatccttgatgggcatttgggttggttccaagtctttgctattgtgcatagtgctgcaataaacatacatgtgcatgtgtcttcatagtagaatgatttataattttttgggtatatacccagtaatgggattgctgggtcaaatggtatgtctggttccagatccttgaggaatcgccacactgtcttccacaatggttgaactaatttactctcccaccaacagtgtaaaagcattcctatttctccatatctgatctctagcatctgttgtttccagactttttaatgatcaccattctaactggtatgagatggtatctcattgtggttttgatttgcatttctctaatgaccagtgatgaggtgctctttttcatatgtttgttggctgcataaatgtcttcttttgagaagtgtctgttcatatccttcacccactttttgatggggctgtttatttttttcttgtaaatttgtttcagttccttctagattctggatattagacttttgtcagatgggtagactgcagaaattttctcccattctgtaggttgcctgctcactctgatgatagtttctatggctgagcagatgctctttagtttaagtagatcccatttgtcaattttggcttttgttgcaattgcttttggtgttttagtcatgaagtccttgtccatgtctatgtcctgaatgatattgcctaggttttcttctagggtttttatggttttaagttttatgtttaagtctttaatccaccttgaattaatttttgtataaggtgtaaggaaggggtctagcttctattttctgcatatggctagcaagtttgcccagcaccatttattaaacagggaatcctttccccattgcttgtttttgtcaggtttgtcaaagatcgaatggttgtagatgtgtggtgttatttctgaggcctgtgttctgctccattggtctatgtatctgttttggtaccagtactatgctgttttggttactgtagccttgtggtatagtctgaagtcaggcagcatgatgcctccagctatgttcttttgcttaggattgtctcggctatatgggctgttttttggttccatatgaaatttaaagtacttttttctagttctgtgaagaaagtcaatggtagcttgatgagaatagcattgaatctataaattactttgggcagtatggccattttcacgatattcataagtatgaaatttttttccatttggttgtgtcctctcttatttccttgagcagtggtttgtagttctccttgaagaggtccttcacatcccttgtaagttgtattcctaggtattttatcttctttgtagcaattgtgaatgggagttcactcatgatttgggtctctgtttgtctgttattggtgtataggaatgcttgtgatttttgcacattgattttgtatcctgagactttactgaagttgcttatcagcttaaggagattttgggctgagacaatggggatttctaaatatacaatgacatcatctgcaaacagagacaatttgacttcctccgttcctatttgaatactctatttatgtctcttgcctgattgccctggccaaaacttccaatactatgttgaactatggtgagagaaggcatccttgtcttgcgccggttttcaaggggaatgcttccagcttttgcccattcagtatgatattggctatgggtttgtcataaatagctcttattatattgagatatgttccatcaatgcccagtttattgagagtttttagcatgaagtggtgttgaatttgattgaaggccttttctgcatctattgagataatcatgtggtttttgtcactggttctgtttatgtgatggattacatttattgatttgcatatgttgaaccagccttgcatcccaaggatgaagccaactttatcatggtgcataagctttttgatgggctgtggattcagtttgccagtattttattgaggattttcgctttgatgttcatcagggatattcgcctgaagttttcattttttattgtatctctgtcaggttttggaatcaggatgatgctggccttataaaatggttagggaggagtccctccttttctgttgtttggaatagtatcagaaggaatggtaccagctcctctttgtacctctggtagaattcggctgtgaatctgtctggtcctgggcttttttggctggtgggttattaattactgcttcaatttcagaacttgttattggtttattcagagattcgacttcttcctggtttagtcttaggagggtgtccgggaatttatctatttcttctagattttctagtttatttgcttagaggtgtttatagtattctctaatagtagcttgtatttctgtgggatcagttgtgatatcccctttatcattttttattgtgtctgtttgattcttctttcttttcttctttattagtctggctagcagtctatctattttgttaatcttttcaaaatagcagctcctgggttgacagacacctcatacaggagatctccagctggcatcaggctggtgcccctctgggacaaagcctccagaggaaggagcaggcagcaatctttgctgttccgcagcatccactggtgatacccaggcaaataggaactggagtggacctccagaaaactgcagcagacctgcagaagagggtcctgactgttagaagaaaaactaacaaacagaaagcagtaacatcaacatcaacacaaaggacccccatacaaaaccacatccaaaggtcatcagcctcaaagatcaaaggtagataaataaatgaagatgaggaaaaaccagcacaaaaatgctgaaaatttaaaaaaccagaatgcttcttctcttccaaatgattgtaactcctctccagcaagagcacaaaattggacagagaaagagtttgacaaattgacagaagtaggcttcagaaggtgggtaataacaaactcctctgagctaaaggagcatgttctaacccaatgtaaggaagctaagaaccttgataaaaggttacaggaactgctaactagaataaccagtttagaggagaatataaatgacctgatggagctgaaaaacacagcatgagaactcgtgaagcatacacaagtatcagtagccgaatcgatcaagcagaagaaaggatatcagagactgaagatcaacttactgaaataaggtgtgaagacaagattagagaaaaaagagtgaaaaggaatgaacaaagcctccaacaaatatggtactatgtgaaaagaccaaaccggtgattgattggggtccctgaaagtgatggggagaatggaacccagttggaaaacacacttcaggatattatccaggagaacttctccaacctagcaagacaagccactattcaaattcaggacatacagagaacaccactaaaatactccttgagaagagcaaccccaagacacataattgtcagattctccaaggttgaaacaaaggaaaaaaatgttaagggcagccagagagaaaggtcaggttacctacaaagggaagtccatcagactaacaatggatatctctgcagaaaccctacaagccagaagagagtgggggccaatatttaacattcttaaagaagagaattttcaacccagaatttcataaccagccaaattaagcttcatgagtgaaggagaaataaaatcctttacagacaagcaaatgctgagggattctgtcaccactaggcctgccttacaagagctcctgaaggaagcactaaatacagaaaggaaaaaccagtaccagccactgcaaaaaaacaccataatataaagaccaacaacactatgaggaaactgcctcaactaatgtgcaaaataactagccagcatcatgatgacaggatcaaattcacacttaacaatattaactttaaatgtaaatggactaaatgccccagttaaaagacacagactggcaaattggataaagagtcaagacccatcagtgtgctgtattcaggagtcccatctcacatgcaaagacacacataggctcaaaataaagggatggaggaatatttaccaagcaaacgaagagcaaaaaaaaaaaaaaaaaaaaaaaaaaaaaaaaaaagcaggggttgcaattctagtctctgataaaacagactttaaaccaacaaagatcaaaaaagacaaagacgttacataatggtaaagggatcaatgcaacaagaagagctaactatcctaaatatatatgcacccaatacaggagcatccagattcataaagcaagttcttagagatctacaaagagacttagactctcacacaataatagtgggagagtttaacaccccactgtcaatattagatcaatgagacagaaaattaacaaggatattcagaacttgaactcagctctggactaagcggacctaatggacatctacagaactctccaccccaaatcaacagaatatacattcttctcagcaccatatagcacttattctaaaatcgaccacataattggaagtaaggcactccttagcaaatgaaaagaatggaaatcaaaacagtctctcaggctacagtgcaatcaaattagaactcaggattaagaaactcactcagaaccacacaactacaaggacactgaacaacctgctcctgaatgactactgggtaaataattaaattaaggcagaaataaataagttctttgaaaccaatgagaatgaagacacaacgtaccagaatctctgggacgcagctaaagcagtgttgagagggaaatttgtagcaccaaatgcccacatcagaaagcaggaaagacctaaaatcaacaccctaacatcacaatgaaaaaaactagagattcacggggggaggagccaagatggccgaataggaacagctccggtctacagctcccagcgtgagcgacgcagaagacgggtgatttctgcatttccaactgaggtaccaggttcatctcactggggagtgcctgacagtgggtgcaggacagtgggtgcagtgcaccatgtgtgagccaaagcagggtgaggcatcacctcacccaggaagcacaaggggtcagggaattccctttcctagtcaaagaaaggggtgacagacggcatctggaaaattgggtcactcccaccctaatactgcgcttttccaatgggcttaacaaatggcacaccaggagattatatcctgtgcatgactcagagggtcctacacccacggagtctcgctcattgctagcacagcagtctgagatcaaactgcaaggcagcagcgagcctgggggaggggcacccaccattgccgaggcttgagtaggtaaacaaagcagccaggaagctcgaactgggtggagcccatcacagctcaaggaggcctgcctgcctctgtagactccacctctgggggcagggcacagacaaacaaaaggcagcagtaacctctgcagacttaaatgtccctgtctgacagctttgaagagagtagtagttctcccagcacgcagcttgagatctgagaacgggcagactgcctcctcaagtgggtccctgacccccgagtggcctaactggggggaacccccagtaggggcggactcacacctcacacggccgggtactcctctgagacaaaacttccagaggaacgatcaggcagcagcatctgtagttcacaagtatccgctgttctgcagccaccactgctgatacccaggcaaacagtgtctgggtggacctgtttagtggacctccagcaaactccaaaagacctgcagctgagggtcctgactgtttgttagaaggaaaactaacaaacagaaagggcatccacaccaaaaacccatctgtacgtcaccatcatcaaagaccaaaggtagataaaaccacaaagatggggaaaaaacagagcagaaaaactggaaactctaaaaatcagagcgcctctcctcctccaaaggaacgcagctcctcaccagcaacggaacaaagctggacggagaatgactttgacgagttgagagaagaaggcttcagacgatcaaactactctgagctaaaggaggaagttcgaacccatggcaaagaaattaaaaaccttgaaaaaaaattaggtgaatggctaactagaataaccaatgcagagcagtccttaaaggacccgatggagctgaaaaccaaggcacgagaactacatgacgaattcacaagcctcagtagctgattcgatcaactggaagaaagggtatcagtgatggaagatgacatgaatgaaacgaagcgagaagagaagtttagagaaaaaagaattaaaagaaatgaacaaagcctccaagaaatatgggactatgtgaaaagactaaatctacgtctgattggtgtacctgaaagtgatggggagaatggaaccaagctggaaaacactctggggaagttctcctggataatatcctgcaatctagcaaggcaggccaacactcaaattcaggaaatacagagaacgccagaaagatactcctcgagaagagcaactccaagacacataattggcagattcaccaaagttgaaatgaaggaaaaaatgttaagggcagccagagagaaaagtcgggttacccacaaagggaagcccatcagactaacagctgatctcttggcagaaactctacaagccagaagagagtgggggccaatattcaacattctcaaagaaaagaattttcaaccagaatttcatatccagccaaactaagcttcataagtgaaggagaaacaaaatcctttacagacaagcaaatgctgagagattttgtcaccaccaggcctgccctaaaagagctcctgaagaaagcactaaacatggaaaaaacaaccggtaccagccactgcaaaaacaggccaaattgtaaagaccatcgaggctaggaagaaactgcatcaactaacgagcaaaataaccagctaacatcataatgacaggatcaaattcacatataacaatattaaccttaaatgtaaatgggctaaatgctccaattaaaagacacagagtggcaaattggataaacagtcaagacccatcagtgtgctgtattcaggaaacctatctcacgtgcagagacacacataggctcaaaattaagggatggaggaagatctaccaagcaaatgacaaacaaaaaaatgcaggagttgcaatcctagtctctgataaaacagactttaaaccaacaaagatcaaaagagacaaagaaagccgttacataatggtaaagggatcaactcaacaagaagagctaactatcctaaacatatatgcacccaatacaggagcacccagattcataaagcaagtccttagtgacctacaaagagacttagactcccacacaataataatgggagactttaacaccccactgtcaacattagacagatcaatgagacagaaagttaacaaggatatccaggaattgaactcagctctgcaccaagtggacctaacagacatctacagaactctccaccccaaatcaacagaatatacattcttttcagcaccacaccacacctattccaaaattgaccacataattggaagtaaagcactcctcagcaaatgtaaaagaacagaaattataacaaactgtctctcagaccacagtgcaatcaaactagaactcaggattaagaaattcactcaaaactgctcaactacatggaaactgaacaacctgctcctgaatgacgactgggtacataatgaaatgaaggcagaaataaagatgttctttgaaaccaatgagaacaaagacacaacataccagaatctctgggacacattcaaagcagtgtgtagagggaaatttatagcactaaatgcccacaagagaaagcaggaaagatccaaaattgacaccctaacatcacaattaaaagaactagagaagcaagagcaaacacattcaaaagctagcagaaggcaagaagtaactaaaatcagagcagaactgaaggaaatagagacacaaaaaacccttcaaaaaaatcaatgaatccaggagctggttttttgaaaagatcaacaaaattgatagaccgctagcaagactaataaagaagaaaagagagaagaatcaaatagatgcaataaaaaatgataaaggggatatcaccactgatcccacagaaatacaaactaccatcagagaatactataaacacctctacgtgaataaactagaaaatctagaagaaatggataaattccttgacacatacactctcccaagactaaaccaggaagaagttgaatctctgaatagaccaataacaggctctgaaattgtggcaataatcaatagcttaccaaccaaaaatagtccaggaccagatggattcacagccgaattctaccagaggtacaaaggaggagctggtaccattccttctgaaactattccaatcaacacaaaaagagggaatcctccctaactcattttatgaggccagcatcatcctgatagcaaagcctggcagagacacaaccaaaaaagagaattttagaccaatatccttgatgaacattgatgcaaaaatcctcaataaaatattggcaaaccgaatccagcagcacatcaaaaagcttatccaccatgatcaagtgggcttcatcctgggatgcaaggctggttcaacatatgaaaatcaataaacgtaatccagcatataaacagaaccaaagacaaaaacgacatgattatctcaatagatgcagaaaaggcctttgacacaattcaacaacgccttcatgctaaaaactctcaataaattaggtactgaggggacgtatctcagaataataagagctatctgtgacaaacccacagccaatatcatactgaacggacaaaaactggaagcattccctttgaaaactggtacaagacagggatgccctctcaccactcctattcaacatagtgttggaagttctggccagggcaatcaggcaggagaaggaaataaagggtattcaattaggaaaacaggaagtcaaattgtccctgtttgcagatgacatgacggtatatctagaaaacctcatcgtctcagcccaaaatctccttaagctgataggcaacttcagcaaagtctcaggatacaaaatcaatgtgcaaaaatcacaagcattcttatacaccaataacagacaaacagagagccaaatcatgagtgaactcccattcacaattgcttcaaagagaataaaatacctaggaatccaacttacaagggatgtgaaggacctcttcaaggagaactataaaccactgctcaatgaaataaaagaggatacaaacaaatggaagaacattccatgctcatgggtaggaagaatcaatatcgtgaaaatggccatactgcccaaggtaatttatagattcaatgccatccccatcaagctaccaatgactttcttcacagaattggaagaaactactttaaagttcatatggaaccaaaaaagagcccgcattgccaagtcaatcctaagccaaaagaacaaagctggaggcatcatgctacctgacttcaaaccatactacaaggctacagtaaccaaaacagcatggtactggtaccaaaacagagatatagaccaatggaacagaacagagccctcagaaataatgccgcatatctacaaccatctgatctttgacaaacctgacaaaaacaagcaatggggaaaggattccctatttaataaatggtgctgggaaaactggctagccatatgtagaaagctgaaactggatcccttccttacaccttatacaaaaattaattcaagatggattaaagatttacatgtttgacctaaaaccgtaaaaaccctagaagaaaacctaggcaataccattcaggacataggcatgggcaaggacttcatgtctaaaacaccaaaagcaatggcaacaaaagacaaaattgacaaatgggatctaattaaactaaagagcttctgcacagcaaaagaaactaccatcagagtgaacaggcaacctacagaatgggagaaaattttcgcaacctactcatctgacaaagggctaataaccagaatctacaatgaactcaaacaaatttacaagaaaaaaacaaacaaccccatcaaaaagtgggcaaaggatatgaacagacacttctcaaaagaagacatttatgcagccaaaaaacacatgaaaaaatgctcaccatcactggccatcagagaaatgcaaatcaaaaccacaatgagataccatctcacaccagttagaatggcgatcattaaaaagtcaggaaacaacaggtgctggagaggatgtggagaaataggaacacttttacactgttggtgggactgtaaactagttcaaccattgtggaagtcagtgtggcgattcctcggggatctagaactagaaataccatttgacccagccatcccattactgggtatatacccaaaggactataaatcatgctgctataaagacacatgcacacgtatgtttattgcggcactattcacaatagcaaagacttggaaccaacccaaatgtccaacaatgatagactggattaagaaaatgtgacacatatacaccatggaatactatgcagccataaaaaatgatgagttcatgtcctttgtagggacatggatgaaattggaaatcatcattctcagtaactatcgcaaggacaaaaaaccaaacacggcatattctcactcataggtgggaattgaacaatgagaacacatggacacaggaaggggaacatcacacaccagggactcttgtggggtaggggaggggggagggatagcattaggagatatacctaatgctaaatgatgatttaatgggtgcagcacaccaacatggcacatgtatacatatgtaacaaacctgtatgttgtgcacatgtaccctaaaacttaaaagaataataataatacaaaataaataaaaataaattgtacatcaagtaaaaaaattaaaaaactagagaagcaagagcgaacaaattcaaaagctagcagaagacaaaaaataactaagatcagagcagaaatgaaggagatagacacacgaaaaacccttcaaagaaccagagagtgactttcaattgaaggacagagccataccaaggtgaccttacagggaaacagctgggagagtaaatacctaatttcactcttccctgtctctgatctacagcccagctagaagccaggaggagcagacaccctgctgatggagcccaacaaggtcagcctcccatgtctgagagaagaatggattctggttctggaggagcagtcaaaagatatcggcaaaaactctgtcacagtattggccactttaaaaaatagatatattccatacttctgcagtgagatgggctgaaaatatatttgaagctgttatatgaaaagccacaaaacctttcctagctccagctccctggttgtagtttcatgactgtggttcatatgttttatttttaaattcccttttctattactgttttaaaatgtactttgtctaagatatgtattaaagggccatattttaggaaagtccataaggagaccttctttgagaaatgacatatccctttttctttaaccatcactctcatcccctctttggctatgacatttccattgttagcagttggtaggaaccaggccaaggatcacaaggagccaggaattgctgagctgactgaactgcctttattccccggctttggagcacctggatcaaccatacacatttactgctgcttctgatgatgtgtttttacactgaatgcatttttcatgttgtttgttaaagatatgcagggagagtaactcagatgattctaataacatgattatattgagataggactaagggagaattttggtgtttgcaaagaaattatttttaagttctctttttttttcctgtagaaagatgttgtgtccctcctggtgagcgctgtcccagtgcacccgataatggcgaagaaaatgtggtaaggcattatttcctttatcaaaccatatacagtataaaaatgcttctttaaaagggtaattgaagttctgactgattcacatatcatcaagcaagacttttatacagaaaaaaacagcagcaggggttgcaggataatatagcacgaaaaatataattaggcttttcccaatgtctataattaaacaggctctacttgcttaaatacatggttgttcttcttgtctcctattgttatttgtagagaagatctccaatggcattgtgcatatgagggtgagccaatgtacttattcttatgatagaagcatgaaacatgggattgtatacaagtggaaagaaacacaactataattcacttgcaaattatagtttgattgtatacttcctttttactgcattccttttagtatttatgtgttccattaatcagagtataaataagggccaggagtgtggtaaacttgttttttccactgttaaaaaccatgaaacagctagtagggagattaaaattaactgataagactcagacttattttataatggtctcatggatctttaatttcagatgcaagcaatagactaaagctttttgccgcccaccccaaaacactactatcaataaatatttaagatataaatggttattctgacttgaacaacagacatttagagtctatttttcttgcttctagcctctttcaggaaaagtataggaaatgagagaagactgtgacaactcatgacctgcatccttaatatccagtgacttcatctcccctttcttcaccacaattccaggcaatggcctgtcggagcagacaattctaccactgcaaagagttgtaaccattttctggtatcacatttatttttcaagacatacttttcaagacatcattcactgacccactacctgcattgagtataaatgcctggatgttaaggattccaatttaactttgaaaagaactgtctcattcatttacatttctgttacagtcagcccaggaggttacagtgagctctccactaagaatctggaagaaatgcatcactaggggttgattcccaatctgatcaactgataatgggtgagagagcaggtaagagccaaagtcaccttagtggaaaggttaaaaaccagagcctggaaaccaagatgattgatttgacaaggtattttagtctagttttatatgaacggttgtatcagggtaaccaactcgatttgggatgaatcttagggcaccaaagactaagacagtatctttaagattgctagggaaaagggccctatgtgtcaggcctctgagcccaagccaagcatcgcatcccctgtgatttgcacgtatacatccagatggcctaaagtaactgaagatccacaaaagaagtaaaaatagccttaactgatgacattccaccattgtgatttgttcctgccccaccctaactgatcaatgtactttgtaatctcccccacccttaagaaggtactttgtaatcttccccacccttaagaaggttctttgtaattctccccacccttgagaatgtactttgtgagatccaccctgcccacaaaacattgctcttaacttcaccgcctaacccaaaacctataagaactaatgataatccatcacccttcgctgactctcttttcggactcagcccacctgcacccaggtgaaataaacagctttattgctcacacaaa

SEQ ID NO: 713 - DNA, 37796 bp, Homo sapiens
ctacccctttgtgagcagtctaggactttgtacacttgttaagtagggagaaggcaggggaggtggctggtttaaggggaacttgagggaagtagggaagactcctcttgggacctttggagtaggtgacacatgagcccagccccagctcacctgccaatccagctgaggagctcacctgccaatccagctgaggctgggcagaggtgggtgagaagagggaaaattgcagggacctccagttgggccaggccagaagctgctgtagctttaaccagacagctcagacctgtctggaggctgccagtgacaggttaggtttagggcagagaagaagcaagaccatggtggggaagatgtggcctgtgttgtggacactctgtgcaggtgagtaggccccttttctctccagtgcccaggggtgggtgagacatggggacctagggctgaaggagaggctctgtcagagccttcccaggaagggcctccagcaacacagctgcgttcctgctgggccagaattacacattccggaccagtgcccagaatcagaatggtttttatttacatattagtaaataacattctagcccactgctgaaatgaagaattcaaagtactctcaagaccatattttcttatcccaaattagattataggatcagacacaggatttgacaatgtggacaaagtatttgaaatcggagttgtcctagaaaatccaggatgtgtggatctagatatgttcattatctagtatattaacgtttgtgttaaaaccagagaaagagacaggaaactgaggcagaagagacaatgcaacttatcccgtatcattcacagagcaagagaagattcaaaccctaaaaacaaacaacaaactagatgggtcttttccaaaggccaaagctccttgccacttctgggaccctggtcattgaaaattctgggactctgagcatttccctctgggagggaaacctcccagaacaaaatcagacattcatgagtatatggttgaatccacatcaagtgcttaatagcacagtgttctgtggggacctatggagtgtctaagggttagaatgaaagtcttggcattaaggtaccaaccattttgctgggcattggaaggaaatagaatggagagaaggaagttgagagacgcagggtttggcaaagtttaggaatatctttggtttagtgtatttggccatcaccttgcaattcagacactgttgagggcttccaggatccagctgcaacggggaggagaagagctataccaggaaactcaggagcaccaagcctggggaagtggaaaccaggagactggtttagagctcactttttagcatacacaggaaagccccgggccacggggcctacagctcattctggttctcccaggccctagacatgcttttctctcaacacctggccttggggctctcgagggaagggcagcctgctgctggggaagggctggatcacacggtttggaggaagatctgggtaagatcattctctcaggctggctcaagttcatctgactgaaggcagaaagcccctcatcatccaccaagatggactggttggctcattcctttatccaaacaactctttactgagcacatagtttgtgcaggtgccatagaagtgaggagtctggaatgattagtcataagtgggcctatctcagccatcagattcaggcagggaggatgctccagggcctgagagagggaggctgaaggaaatacccatccttccctggctgggccagtgattctcccatcttctcctggtaagccagaagctcctccatgcctgcaccaccccaacccccaacacatatccccacacttgtagactggctgcgacccatgcatgaataaaaataagaaattttggcttagaaaaacgatcttaaaacaagatgctcacccagcttggagggaaaagtggccgtaactctgaattgcctggagcaggacattttgcttcttcctatgagaaggcaagtgacccctggggaactcacccagcagaacgagtcttgggcatgttttcagacacactgatgaagtgtcttctacctccgccccatccctcccaccacagcctgcccagcacagaatcacgtgcccaccaacttttcttcctccatatcttacattaagaggaagaaggggccagagcagtggggcaggagaagccaggcttggtggtcgacttgaggtatataaacagagtttaccaaatagtgaaatagccattgccactgcaggtgagcaaggaagaccttcaaaggtcgaccaaaagcaaccaggcggccctccccaccatgcctcatgagaggataccacctcttcctttgcgcaggtaagggagacccagttaggagcagggacattaggaaaggcttcctggaggaggtggagcttgacttgggttccagaggacttactgggcttttctcttctttctcttcccatctgacctttccgaggaattgattctgctaagacctgggcagggaagcactgcactgatgaatgggcctcaagactcaagtggtgttggaggaagcagaagctattcataaggttccatgcagggggcacaaacgcaaggccgtgcttttaaagtagggagtttaaaagcaatcataaaaccgactaaaagttggtctgctttgtgtgtgtgtgtgtgtgtgtgagacagagtctggcttgctcaggctggagtgcagtggtgtgatctcagctcactgcaacctccgcctcccaggttcaagaaattctcctgcctcagcctccctagtagctgggattacaggcatgcaccaccatgcccagctaattttttgtatttttagtagagacagggtttcaccatgctggccagactggtcttgaactcttgacctcgcaataagcccgcctcagcctcccaaagtgctgggattacaggtgtgagccaccgttggtctgctttttatgattatcatgtgctgacaattctaaacagagtcagtgacaaaacagacctccatgcctgggaaatgttccacccgtccctcctaacactccactgccatcccaggggaccaaagggggctgaccccagtgcctcttaactgactatggtgtgggcaaatggcttcactttgctaaagtcttcttgcacagtcttctagtctgaaatggaggggtgtaaaattcacactgtgccccaacagggctattataggtactaaatgagtttgcacatgtaaaaatcttagaagaggacttgacacataataacaactcaataaatgccagttatgagtgcagttattattattactgtgggggaatgtaagttacagaaaattagtagactttggtgaccaattatccgagagctctgagatggcagacacgtgccaagaaagggagtcagaggtcactgtggatgaaccctaagttatcaccaaaaaagccgccatgcgctgccccctccacaaggctgttagagaaaatgctccaatgtgtgcacaaaatcaaggcacttccattccaggattttttttcagccaccagacttcatgaaagatttgatgtgctgcaatgtgccgctgcatgaaaagggatgcataaagaggcaagctccaggagacaaaagtcactgaacagctctgctcagagccagtgaaacctttgaagacccaatctctcacacacacacacacacttacttacacaccccaccttcctagaatgagaggaagcttccttgtttttctaagttaaatgagaaaaactcaggagaactttaacctgggaaaggtgtaaaagctttcttctctctagaaaaaaatgttttttctccccccatataaaaaagtttcagaaaacccacaggtgcttgatccatgaagagtttttgaagggaaccaagtttgcaagttgctgacattttgaggctgattgtgccattttagaacccttccctggcatctttgttagaggcacaatcccagcaggaagatttttcctaaatgtggtgccctacacttgtctgctctgaagtgccatgttcgtgtggatcacacaggtgtgggttggtccctggggtctgccctatcacgatggcctatctgagcccagtgtcacatgtctaagctctgtgcagtggcctagcctaagatatgtggtttaggggcttagcctcagatgtgcacttctgatgagaccctggacctcaagagggtagtatttgggccagagccggggtggtgtcagcccgcaaatgcaactgcaagataagcggcccgcccaccatctgctctgtggccctgggtcctgttgccattccaatcctaaattagcctggctccccgctggggcctgggccccacctgctggcacctgagcacaagtcagaagccagtgcttgtaggaagagctcatgcacctggaatgaatcacattgcctccctgtcagagacgcaatcaggattaaaatgtcctactctagtctcagtcccagcctcaatggagaaaagatgttatgaatggtcggtctaagaaggttaggtgttcaaaagaggaagactaatagtttaggccagtggctctcaaccctggttgcccatcagagtcacctgggaagtgaaaatacagatgcccagtctcccccataccttctgagtcagaatccagaggggaaggatctgggtttctctctggtttttgaaaagttactcaggtgattctgatgtgcagtctaggtgtagagacgaattggaacttaaggaaaagttggtttaatgaacagttgcctctaatacactgcatgtgacttttagctcagttttgcatcatccagctgcttctccggttactgtccaattccctcaatttagggggctcaatggtatgcattctcccacattagtgtgcatacaagtcatctggggatcttgttaaaatgcagatgattcggtatgtccagggtagggcctgagattctgcatttctaatgagctcccaggggatgatactcctggtccagggaccagagtctgagaagcaaggccatagggaagaattggttcatgggcacaggtgtgatcctcatcttgcctttgcccaccagagtcccctctcagggctttttggtaatacaaccatgctgcctattgtgatgctggtcaccaggaagcctggggaaagtgtgcctggcccagcatgtacttgtaatcctggcagtgtttgacctggctaatctctcccgcatttctgaaacactctgtcctgttggttcccatgagacttcctctccttgttctcctcctacatctctggccttgatgtttccatgtctccttagcagcctcattctcctctgtcctgccatgaaatgtcagagtccctcaccctcagtcccaggctctcctattgtcactctacatccacctccacctccaaagctttagttgccacccattcccagctgacttataaatttctgtcttcaaacccaacatctctcctgagctattgtctcacaagtccaacagcccacatgacttctcaacttagatttgtggaacactgaaaactctcaaactgaaaacaaaactcatgatctttttccccaaacctgggtctttcccagtgagctctctctcaataaatgacaaactgtccattcaggaatgaaagccagaaacctagcagtcatctgttacattttctattgctgtgtaataaaccactccaacatttagtgacttaaaacaataataatcatttattttcctcttaaattagcaatttggatggtgtttggcagggacagcttgtctttgctttatgctttatgctgggttggcttaaccggcattggaagacccacttccaaggtggtgcactcactggctaacaagctggtatatagtctaattcctctctccaggggcctctccacagacaagcttgtgcctcctcataacatgatggctggattcaagagtaaacatctaaagagacaagaagttaaagctgctagtttcttagggcaaagcccagaaactgacccagcatcacttctgccatagtctattgagaagcagtcacagaacccaactcaaaggagagaataagaacaccttttgttgagagcagtttaaaagaatttggggaccacattttaaaaccgccacatcacccttgatctctttatcccccacctacaaattcagatcatcactttgtgtgatgattttagctctccagcatttcttcaatctgcccgtttttctccatttcctctgccacctcatgctccacactgcctctcctaagctactgccacagctgcctcacttgtctcctgagcctgtttgcccttctcctaactgctgtccaccctggagccagaatgatcttgtaaaataaaatcatgaccatgtcaccacctctgcttaaagcccttccataacttcccatgactattaggataaagactcaaatcgttgtcatggccgataagcgccaggcccagcccacatttctggctgcactggccatgtatggtgtgatttgagttgcttgtaagaggatcttggtgggggcaggcaatctggctgaaagggtggatagcaggatttgtcctcaactacttggatgagacaaggatgctgtttttacttgtcctgtatttggacaagtttatttggattgacagtgggaggctaaaggatatcatatggggaatcatacacccccaagaaacctccctggtgccatagctacacactggtttgtgttagtttctggaacatgcctcgccttctgccaccccctgacctctgcatgatgcccttccctcacatctcttctcctattttctcaaggttcactcctgcttatatttcaatctcagctcaaaaggcccttcctcagggcaccctctctgttatatcctcccatcatatgcatgacactcgttactatggtggttttacatttatttctatgattatttatttattaccatctgacttccctggaacagtgaacgccgtgagagcagcaactgcatctgtccctgccccacgttgtatccccagagtctggcatagtgcccaggacacaggcacccagcagccgtttgctggataggtgttagtgaatgggtgccgacccttctgaacctcccctagcagcaggctgactggcttcaccatttcctatcctgcctttcctgcttttcttcctcctccaggctgcccctgcttgtctccaacctctgtgttcctaatctcacttgcttctctcaaaatgttcctgtctcacattcctttcctgggtttgatagataaggggcactagctagttagggagatggattactccacaggttaaagtgacttagagaaagtcacttagtgtgtcttccctgcctctcagacatcacctgcattttagcaggagcttctgtgccttctgtcaatggtggaagtttcagtattgcaagagctggtggaggacatagtggacttggggggaagttcagttgcccctcaagccaccccgggttggcagcactcaggttttgccctccatcgtcttctctctgcctgctctgtggggcttgtctctgttcccagatcaccctgtcccctttctgcctggggcaccaaccgtcaagcttggaacccgcctccttcctgaggtgtttccctctcctctcctacccagtgacctttggactgcttcctcattttctgccctggtgagtcagggatgccataaacaccaggcatgggcagaacatggcgacagacagacgcttcccattagggccgtcacaaagttcactgggagaggagcataaaacgtatatctgttggctagagctcacgccctgcacgtgtccaccaatgtatctccatctgcatttggggaacaggtgacacttgccgtgagcaaagctggctttccaactgtgccctggcccttcccctcctctcgggtcccctcccaggctaaggtcttgctccatctggtgtctgctgcactttcagactcttccttgctggcagcaccttccctataacctacaaacccacctccatttctccttcttcaatcccaaaggggctaaagaaatctgctcaggatcctctgtgcccctctggtctcagctttctcatcttccagtgttaggtgagctcctgacaaaataggctgccctcactgtctctactttttcacctcctagttggctttattgttaaaagagggctgtatgtttgttgcagagcatttgggaaataaaagtacacatagaagaaatctcagattgccccacgatctcagaatccacaggtaactgttattaatactgtattttggtgtattttcttctagaaatattctctctctctctctgtctgtgattgtgtaggactgggacactgttgtatgcacagttttgcatcctgctttattcccttatatatgcagtccaacaccgtgaattgaatccctcgggttctacctcctcaataagccttcccattaaatctcttttcctggttttaactcagctcctcccctacacacctcactcccttaacacttccactttaacacttaattgggctctattaggatgctggctgacagtaacctctgactgcttcctgagcagggattgtgccacataccactcaatcaacaaggccttattaggacccagctcagtgtagacacctggcaggtaaagccggcaagtggtggatataagagaagcctgagactcagacgctgccccagggagcctgccatctgttgagggaaggagcctgatgcacagcccatatcaacacgagaactacatgtacctgggatacatctgcccgaagtggctcgggaaagccaggcagcaggaagggctggggtggtcctggtggggcttccaagatggcgtgtgaacacacctctgatcatttttctggtgccttgcactaaactaggacattggtagaattttattggattgatctgaatttatagatgcataaagaatcatgttgaatgaacggttcaacatttattgagtcctaaaccacctccctccctgcctctcaatctctcctctctcagctgccagtttgagagcctccctgcccatagaggaaggacaaaccaacctgcgtgtgtgaactgccttcttctccctagagaccagcactttctcaacaccagcacatggtacttggtcctggggctggctgggtcctttctggcctccagaatctcctccctaagaacgtggtttctctgagcaaatagattttcccaagtggaggcattactgccagtttcccaagggctcacataatgtgctatgtatgcctcaagccaccggttccatcaagcatttcattatcctccaacgtattattttccatttagttctcaagagaccgtttattatcttcttaataaaccttaattttttacaagcaatcatcgagacctcaggctggctctccatatggacccccttagggaggggaaatgacctctcccatttccagctgaggtatcttgcagactccacttctcatctctggggctcctttggtcctttattttacttttggtcaatttccagcaattcattgaataggttcttccaccaagtttctctggttttaaatcctacccatcctgtaagcttaagttctctataattcattcatttgctgtcaaaaaacacgtattgagaccttttacatgttaggcactttgccgagctctagggatatgaagatgaagaaaacacagggcagcagaggagagagacatgacaacctagattgcctgtagagtcctttatgtcccagggtaaaggatatgcactttatgtgaagtcattcaaccctctcacaacctggagttggataatatgatgatgctcacttcacagttgaagaaactgaagcccagagaagttaattcagttgcctaaggttacacagttaggaaaagtaagaaagaggatgccaacccggatagtttggctgcaatgtttgtgctcttggccatgctgctgtattgtgtaataaagttttatgagagagaagcactaggaggcaggaagccatgggtagtaggtgacacaaaggacagagttatcaattcttcttgggaaggttggggcatcttctttaggacaatgcatgtgctatcatgcaagagattgttatgattccttccttgcaggtaaaggcgcttgcacttctaacctgtatacccctggaggttaacacattgatacattattagttagtaacaccttacagtaaattagcttatccgatggatgctcttcttgagcatcagaagagctcagccttgacaaggagagtaggggagagaggatggaagaaagaaaatgtctagagcatgacgggcacagggcaaagggagtgactggatgggagagccacagctactgggaggagggtgggctctgggcaactggagacctgatattcaatgccaacctatacaaggaagcggaaagtgaggtagctggaagactctaaaaatgagcttcacttctcaacttcctaatcccagcttagatgtcctacctggtgctttggtctcattcactgagtacggatgcaaagacccccaggagagaaaatgagggatgcagtgctaataaggataaagcctgtggaaaaaagtaaaagaaactggatttattccagatggaggtgaaaaagctggtgattgcaaacatcagaagcctctaaagctacaatggcgaattattaaaaagtccagccagatgtcttcattgccagtaatgtcagaacaagaggatattgactgaatgggtggaaaggatttaggctagctatgaaggattcccaagatggctgttggcataaagttcttaaacacggaataacttctcgtctcaaattatggaaaatgtaagtgtgcctcagggcacaggatgagctttttaagatgcttctcaggtttacaaagaacattgaaagagtgctccacattttccacatttgtgcaagttttcttttttttctttttttttttttttttggagacggagtctcgctctgtcgcccaggctgtggtgtgatctcggctcactgcaacctccacctcctgggttaaagcaattctcctccctcagtctcctgagtttttgtaactacaggtgcatgctgccacacctggctaatttttgtagtttagtagagacagggtttcaccttgttactcaggctggtctcgaattcctgagctcaggcaatccgcccgccttagcctcccaaagtgctgggattacaggagtgagccaccacgcccagctggtttttttctttatgagctctttcttattcattcatttctatttcttccttcacaggtctaataacatcaaatggattttaactctctgttataatgatctctaaaattgatctattctttagttataatcattagcaattactattcttttttgacagctcacccatggtgatggtgagtgctgcctcttgtgattaacttctaccaaggatgcacctccacaacagagtatgagacaaggaagcagaagtggctcaatatgaaaaatatatgtaatagtaactatcatttattgattatgagttaggaactattctaaacaaagtacccatttcatgtcacttaattctcacacggcccgtttctcaaaggaaaactgtgtggcacagaggtcttaagtaaactgctcatggttatatgtatagtaaagaaaggaaccagagttccaacaggggcattctagttctagaatctgtgcattcaaattctatgccatgctgcctcctgaaatggccatggagaagttgtgcgatacagagcggtacacgctccgggattaaagtatcgaagggatgtttctgaaccagaagaaagggagagttgggagacagaatgaacgagtggtaggagtggttgatgggagtatattgccctccttggaaggggatgttcagagaatctgaatacagccaattcggccattccatttggcagagtctcgcctctcacaaggatgtgaggctcctgagaactgtgaggtgctagagaatagtgggtgttgtttctatgcagttgccagccctagttcttttcctacataaaggtcacactgagttctcttctataagcaaatactgtacttagcatttggttaagaggatctaagtgtatgtgtgaagctagtctatgtccattaatttgccagggtaagaagatgactttgtgggcatctatcttatctccctgagtagagcagggggctggttttatatgctaggcacatattaaatacttgttggttgactgaagaaagcagaagagtttctgtgacaagattgaggggtgtgatgtggtcaaggaacaaaataggaaataggttctgttgacagccaaggaaaacaccatcctcctgtccctgcaggcaaaaattagcacttttccctgactgttgggcagcagccctataccctcaccagggctgcctctatctgaaggacttgccagcagctctgccatttgttagctgtcaagctgtcatatctagatagagcaaagggtttaaccttttggaacctcaattatgtcaccagtaaaatagggaaaatacaaatgtctatcattaaagagagtatgaaaataaatgagagaatatctgtaaaatacctgtatggtgcctgtaccattgagatgtaattaaaataacatgagattaacagggaattgagaatgattaactcaatagagtgactcatttttcatccattgatggttgacttaacattcctttaatcttgagtgagcaggtaattagacactccattgtctaaaggaatgacttagtgggttggttctctttgatttgagagtgagaattgttactatcagatagaatttgcttgagttttggggaccaactgtgcatgggccatttaggttctgccagtggcagaagtcccttaatgtgtagtgtgtggccagggtgatagacaagaacagaatcagtgtaaagttcatggagaggcccaagagtggtcaccgtgaggacagcgctccagggaaaatgccctggtccaggcaaggacagaagaggtgaagtaaagatcagtggcagttgccatgactacaccaggcatatgagaaatgatatctagatgggctgtctgctatagctgggagctgggcagacggcactggagggctccattgaagcaagtaaccttctgatgaagggtgacttgttagtaatgatgactaatgtgttttcttctctttttttttttttggaaatggagtcttgctctgttgcccaggttggagtgcagtggtgcaatctcagctcactgcagcctctacctcccagcttcaagtgattctcctgcctcagcctcctgagtagctgggactacaggcatgcaccaccacagtcgctaattttttgtatttttagtagaggcagggttttaccatgttggccaggctggtcttgaactcctgacctcaggtgatccatccacctcggcctcccaaagtgctgggattacaggcacgagccactgcgccctgccagcaaatgttttctgatagacgaaggtggtggaaagacaccagtcacatggagggtcatttgataagtcttggccactttggaatcaccttctggagcagcatcagtgacttgggaagccaacatttgaacaaattttcaggggcttctggcactggcatcaccatgaggaaaatatgcaaatgccaaagaggggaaacctgtttttttgacatcttcctgtctctcattcccaatatccaatactcccggatattataaactcaccccaggagctcacatggccctcactgtacagtgcccattccaggagggtggctgactttcaccttatgaaatactgcttaatgaagtatgaacaacccgaatgcttccctgtttcccaggagcgatttgcattttgaaagagaagtgtgttaatccagctggaatttgcctggatagtggagtcttcccagctgggcggggggacggtcttcagcaggacattttccttctttatgctgcagcctcatcatgggaacattcagtaagaacttgctcacccttctaccaccaaatctaccagcccacttgcacctttagccacatcctgttacagtgggtagacagcccggcatctcttctaaggcctgtcctcccataacaccgtacccccagccccatttgccctacaaggacatcatttctgtccccattctctcttggctcattctcatcatcaacaaacagtgtaaaagtattattttttaaatcatcatacacatattttgggaaaaagggcgtaaactcctcttgaccctatagcctcctttagctgctacagtctccctgctctcttccctttccagcaaacactgtctgcttcctcttgtcccatcagctcttgaactcactcctttcaggctccatccccaccaccccactgcatccactaatgccaaggccacctccatgtggccacatccaatgaccatctctctgccctcaggtccctggttgaacatgtcagcagcatttgagtagctgacctcctttgctttcaagaaacttttcctgctcttggttctcttcctgtctccctagccagattttcctacttctcccttactgattcctcctaatttcctccatcatgaagcactggagtgtcccagggttcagtcccacatgtctttcctgtcttcatgcacttccttagtgatcctcaacatcctctgaccttaactgatggagagccggtgactcccaaagttgtgtctccattccgtgcctctgtggcactccagacttacataactgcctcattgccacctccaccagggtgtctaaggagcatctcaaactttgcaagtcctcaaacaaactcctgatctgccccctgaaacttcctccttccttaactgttgtcatttcagtaaacgacaactccattcttccagttgctgaggccaaatccttctgtctattcctgactcctgttttcctctaacacgccaaatgtagcctgcagtcaaatcccattggccctaccttctaaatacattccaatttggatcacttctcaccacctccccacaatcacctgtgtctaagacattagccctcatctggactattgagccaactcttgcctgatttccttgcttccattcttgttccccaccccacttctatctgttcaccccacatttgccagaatgatcttttaacaatgtatgtcaggccaggcatggtggctcatgcctgtaatcccagcactttgggaggctgaggtgggtggatcacctgaggtcaggagttcaagaccagcctggccaacatggtgaaaccccatctctactaaaaatacaaaattagctgggcgtggtggtgcatgcctgtaatcccagctactcgggaggctgaggcaggagaatcacttgaacctggcgggaggaggcaattcaagatcgagccactgcactccagcctggcaacagagcgagactctctctcaaaaaaaaaaaaaaaaaaaagtaagtcaaatatattttctctgcttaaatctctccagggcattttcacttcattcagagcaaaatacaaagtcctaaataagggctacattgctctatgcaatctgagaccacccccacccccacaacttttccatttcatctctcctcctcactcacttccctcccactacacaatctcccttgctgttccttgtgcgtagactaagctgactcctgcctccctgcctgacccttgcttagcctctgcctggaaagttctcaccactgggatccacatgggtctctgtgccaagcatctattctgtataacaaaccaccccaaaactcagtacttaaaataataacaatctttattttactcctgagtcttcaatttgggcagggatctgcagggtagctcaactctgcacccctcagcatcagttccaacagctaggtggctgggtttgctcactcccatgtctgggagttgaagttggctgtcccaaaggacctcagttggtgtcccaaacacagacacctgtctttccatgtggctgcttacctcccttcagaatgttgatggttttccagggtgagcatcgcaagggaccaggtgaagagaatggccttttatgagttggcctcagagccacataacatcccttacactggagtcacaggtgcacccaggctcgaagagaaggaacacagaccccacctcctgagggaggagagtcaacatcacgtggcaagagcatgtgtgataaaatatgctagtgtggccacattctttttcctaaccttgttctgataaactcatacgagataaactcctgtgaaaatatggtccatctctttacctcgatataatcttattcataaaattctttaccacatacaaatgttccataaatacttgttaaatgagagaatacatcatcatcacaaccaaaacgatggcaggtaatgtttattgagagttttctatgcgccagggagtaataaaaatacttacacatggtatctccattaattttcccaataaatcaaggaaataagtattagagctcctattttattgatgagaaaactgacgctcagacaagttgacacagctggtaagaagtagggctgaggttcagggccaggcaattcatcatgctgtggggtggagtcaggtggaccaaggcccatgtgtttgtcctcatcgcagtcttggaggagaagctggttgccagggccaaggtggccaagatggctctagctgtggctggaggtgcaagaacagccctggacattccctcagtggtcctgtgggcagtgagtgggtatgtctgtccgtgtcgcttacttttcccttccactgcctactttctttccagtcagggtgaccgtcgatgccatctctgtggaaactccgcaggacgttcttcgggcttcgcagggaaagagtgtcaccctgccctgcacctaccacacttccacctccagtcgagagggacttattcaatgggataagctcctcctcactcatacggtaaggatactttacaagttcaggcaacatgggaatgattatcacctgaccaggacctcttagaaggcaagcactatgaagtctttccataaatggtagaataaacactagcacccaggctggagtgggtggggagggagcagtgaatgttgggctcatggagggccagagtatgtcacctttattttgaaaatgtcacctgcccctaaaatatctttctggtggccaatctcaaatgacctaaattgtatcatgcgagtcagtcactccttttgattagcatagcccttgctctgaggccaaattttatgggttttttttcctgtttggattcttttgggaagtgtggaggagttttgttttttttttctatttctatttttaaatagataatataatctcatggtttgaaaatcaaaacctcataaaaagtgtgcattgagaaggctcattcccatccctgcttctcctgtctcacccaccctcttcccacaccctcatcctctatcccccactttcctccacccccaggcagggcatatacgagcatggatatatgtttttatagatgtatttgcgtatatgaatatgtatatttacatatactacacacatactgttttgcattcgactcttaatacatcttgggctctttgtgtatatgagtatatttatctatctcatttttcaacatttgcaaaaggcatttcaatttatgaaggtactatatgtaccatgaatggacatttggtatgtttcttatattttgctgctacaaataacgctgcataaatataaatacccttatatgtacctctctatatatacatatataaaataaattattaaaactctgggtcatgtgaaaaagggtatgtgaattaaacattttgacaaataacatcaaatttttctcattaaatgtctcccaatctttattttcaccaccaacagtgaggacacctatttctccaacacagagcattctcaaactgttcgctatttgccagtctgataagcgaaaaaacatctcattcatcatcaaattaacatttctttaattataagaagtagagcatctattcataagtttaaaagtgaggtcttcttttaaaatgcaaacgtgcctggcagagataagcattaggtccccgaccacttagagtggaaagacttagctttttccctaacaggaaagaaggggtggcctagaacactcaaggcctcgagcgggcaggacggatggggaaagagagcaagtcttggtcagacgcaccaagggaccatgatgggccatagccacctgtcccgactgctcccagagtcccagggtaaaatcccagagaggggagctgctgcctttagcttgtaggagcgaaagggaaccttctcttgccatcatacttatttagcaggccagacttgaggtctctgcctgacagttttctgggtgttaaggtagatactaaagttattttattgactgctgggtcccttacttccagaaggatttcaggcaattgccttgagaccctgcaagagtatagagaaagggatttaaatacggcccctcaaggagattattgtgacaggtcctagcaggtcttctagcctggcggaggtccagggagggaggcttaggatatctttgatgggaggagggttagtgggcagagggtcctgggcagagccagtcagcatcagaaaagagcagaattgggaaggaccggtatccatggactgatccacagcccgagacacctttgcatctcccatcttgtttctccctcgcttgtcagctaagcttcctgaaagagctgtctgcctcaacctggtctgttgcctgtggttgggtagattgcaccctgcacaaggatatgtgcttcattagccaagccatgtatcccagcacaggctgtagagccccttattctaatgttgcacaaagcgcactgcacgcacaggtgtcagacttgacatcgggtctccacattctctgtccatcatggtctcgcttctatacctaatgctctacagaaatcaacagcaacctcttttttcgctcaattcagtacacttcattcagccatcttatttcatctctcattagcatttcacaccagcagccactttccaaccttggagtcttcttgtcttgactttctggaagtcttgtcttggcttttcctcttagctctctgacctctccttgacccttcaaatgaagtaacttggtgacttgccatttctctacttatttatcccgggtggcttcatctagcccatgtctcagtgaacatcgacatgtcattggctcccaaaccttcatccccagttgcactaaactgacctgtctggctcttactgactcctccacctagatggatctcccaccgacactccagataccccacacgtaaagagaacacattgtttattcataaaacattcccttcctttgtgtttcctctcttggaaatgacatcaccaaatatccaagccaaaaaactcttaccctggaagtctgccgttcccttactctgtccatcggatcttctcctggcttcatggtctcattggtgcccccactttcatactcctcaaattcatttcattctttccatctgcattgccacaaccttatctgaggacccatcattttttacctgaattgttaaactggtttcttaaccagtcccttttctccttccaagtcactttccatcctgtgttgagagctgacttcctaaatacatggctctctagcacttcagggtaaatgcaaactgtttagtcccatatacacgatgtctgagacctggcattgtagaatctccggacttcaggctctggagccacaatgcccggtttgaacctcagcgctgtcgtttacttaaacatcatgtgaacttgggggaggcctttaacttcttggtgccttggcttcctcatttgtaaaatgagtgtaatcatatacctactttaggggtgttgtgaagattccatgagataatacataccaagtgcataggctagtacctagcacatagcatacactcaataaatagcagctatgatctttattgctacctgcccaagctcaccctctcaccagtccctcactcacacacttacctccattcatactgaatgactggggttgatatgttgcttcccacatctaattctttctctgtggttcttcttttgcctgaaatgcccaacacctttatcctactccaacacttactctcccaatacccccagccctttgcctggctaattcttagttgtttttaggattcaaggcaactgtcacctctcctaggaagcctcccctgacttaccactctggaagtgatattttcttctggggtcctagagataatcacaagatgttgcaaggtttggttgtctatcacttccatcactctttgggtgcagaattcgtgaattatcatcttcaaatgtcagacacctagtagatgctcagttataataatggctagcacttctagaaacttaacatgtcacataatgccctaactgctttgtgtatattactactgtaattctcactacagtcctgagaggcaggtgttattgtcatcatctccattttgcagaatagttaacagaatcactggtggaacattttgctcaaggtcatacaattagtacatggcagaatggggatttgaattgaagcagtctggcttgaaagtctgtgatttagccattaccacatacaatttgataaatgatgagtctatcaatcaatcagtacattccaaaggcaagagtcaagaaaataaagtgggtttggcagccaaggctggctgcccagcatcatgcctggtacatggaaggtgctcagtaaatactgatagactgaatgagtgaggataggctatggagaaaatggaatggataagagagatgccggagattacaagaggtgaaagtgctgggatcccagatggacccattcacccacatgtgtactgcggtatgaactgcctaacttctttcaatattttcattttaaaaataaactaaaaaaatatatatataatacaagaaatccacaaatgggtagcacatatgcgagctatttgttctgaggggttggcaggtctgtgcttctgggccctggaaactgggggatgagggtagtcagggcaggctggaagcaccaggcaagggcctttgggtgaagacctggtgccatttcttctctctccaggaaagggtggtcatctggccgttttcaaacaaaaactacatccatggtgagctttataagaatcgcgtcagcatatccaacaatgctgagcagtccgatgcctccatcaccattgatcagctgaccatggctgacaacggcacctacgagtgttctgtctcgctgatgtcagacctggagggcaacaccaagtcacgtgtccgcctgttggtcctcggtgagtgtcttcatgtctttcaggagttgtaggaagagggtgggcaggtggcagcacagggagaagagcccaggtgttgagacgaagccagaggcagcaacaaggagctaagactcctcacctcgtccaggctgtcttcagcagagggaccgctcctccctttggaactaaacactattctgagttctccgccaatggccaacagtctcgaggacagagaaggccgacttggagtggtcccttgctctgtcggtgtcctttcctccataccagctcctctttttcataccacacttattacaaagataaaggaaaatcttaaatcctattgcaaagactcattgtgccttaattgggtgctcagggggccacatcatgattctcttatatctttccctgccgtaactttggctacccagcagaaattcttcatgccaccatctgctcacccccatccctcaacagatactccatcagtcaggttctgctccctttgaaatgtgtcccaagataacattcttttcataggaatgacttattattggaatttatagtttgggaaggatctgaaagatcatctactttaatatcctcattttgtagatgaagcccagagaaaggaaggaactgactcaaagtcaaatcgttattggaaaataactgttatttaatgagcacttagtctatgtccaatataagaaatggcaccactgctgggaggtagcaatgctttaaaccaaaacaaagatcttttttccctcttccttttacataattgattgcattttatttttaattaatatgtttaatttaaattaaatttattttaaaatttaatttaattaataattaagatatttttattgcataaggtggttgcctgacgttttgaaagcattatagtgggtccaactatacaactatgcaaactcgcattgtataaagaataactaaggtctccttccaccctaccccctagagaggtagccaatggcaacacaggtaggtattccatattttcctcatgtcctttcaacacacacacactcttgcatacttttctcttttcctttctttcctttaaaaaaaatggaatcatgttataaagatcactctgcgttttttctttctaaccttgtttcatgcgcatttctccagatcggcacatgcagatctaccgattaacagcatacattccatcacacggaggtaccatgatttattcaagtgttccatactgatgaatattcaggctgttaacatttttttgtatgaacaatactacaatagacatcccatacacacacgtacatatgtatgttaggggtcccttaaataggtctcatttcctttgggcaatggaagtattaatgcacactcccccgaaatcctccacataagcattatataaatgctgatccctcttcctcccaaccagggccagccagaaggatacaaatttaatctgagattatggaactcggtgaaaccaatgttttacttttttaaaaaagaagaagggtcgggtgcggtagctcaagcctgtaatcccagcactttaggaggccgaggcggagaccagcctgagcaacatagccagacctcctctctacaaaataaataaataaataaataaataaataaattgaggtggaggatctcttgagttggggaggtcgaggctgcaatgagccgtgatcgagccgctgctctcccacctgggtgacagagaccggcctcaaaacaaacaagcgagcaagcgagcaagcaagcaaacaaacaaaaaacacagagaaaagaaagagcccatttttttaatgcactcgaagaaacaagtttaaattatatacatataaacatatataaacataaataaaaacatatataaacattcacacacacgttttctttcctaatggctttgcagctaggctattttaaggcagccagcccactggggctggatgacctcagtaaaccgaggcgagcatgaagctcccagcccggcggcccctcagcccgcgcctcggggcagcacgcgtggtctcagtctcggtttcggctgggaaaactggggctccgggaccggggacccggtgctccggcctctggcgccccctgacgtctgtagcgggagtcgcaggcttcggagaggccttggcacccgactggttccgtttcccctccctccctatcactgctcctccagtgaatattcaggtaacatctgcattctgctggggaggtaagactgataatataccgagtcccccggaggtctcacgggccccacatgtgtggaaggacgatttgatctgttaaagatctgtttgatcggaggtcctacctgtttttgacggtggaaggctgaggggagagaccttagtgagggatctggacagggtgagagcaggggttcctgggtgaggccagagggtttaggggctgggaactgacacattccgccctaaggctgatctctttgggagtggctggtcacttctttgccattgtctgtacctctgcctctggagagaattaaggatttgctttcagcagttttcccttagaaaatggtggtttcagcaaagctataacagtttttggatgcattcggatgcctttgagtgctctgtagatgccagtaggcctcagttacttttcttccctttttgtcttttatcccaaagaaacctggttgtagaaaggctctactgtcagtcatgcacacttggtgtgactttggggacacctgggactcctcaggtgggattggtgttttgcccgctctccaattgtggaataaagcctttgcttccgattcaaggcattcctgggaaaaggctgaatggtttggatgcgtggagagggatgctcccgtacctctgaaaagctcaagagataaagcttggctcagcaagcccatcctaggggtcctctgggaagtggtgttcaccttctcttgttccccggggacctgcttgttggctgctggtaagagtggtccttaagccgcagactccccctccccacactgctccagtcccagggtctggtgcaggatagatgaggcccggccttgaactttggacctcttatgtttaggaaccatccaagggaaagtgacaatcagggagggcctctaatttccctcatgctcgccccacacctggccagccctcactatggcagcaggagatgttgggcacacccaacaatagcctggctctttccaagaggaaatactgtggctgctgggctagaggggagtggtgtgtgtggaagggtttctctcagcagctgccgggtggggccgagatcagaatgcactcctgatgctcagcgaccgtgcacctggattatagaatgggcagcactgtttattgagcgagcaagccatccaaggggatgtgaaaagaaagacgcagaggagacaggcttgccacctagggattccaggagcaaccctctccactgtgtgtcctccccttctcacctccaaggacacgacctgaagtctcaagcatgcttcatgctgcttcttgcctctgagcctttgcacatgctgttcactctgcctggagtaccatcacctctttctccgaccaccactcccacctccaccactggccttgtttactgtcatgcttccttcacgtcacagctgatcttgggtttggggctgttttaggccttatctgccccagcagccttgcctcctgtctggtcattgttcagctacttgtcttttgcccccactagattccttgacccacccactgtgtcctccaagtgcccagcattgtcagacacacagtaggcacccagtgaggtttgtagaatgaacccagctccacaatggtatcttgacaatgctgagtgaaaggcacaggcttaagcttcccagaaatccagggaatcgggttggggttgtgagatgagggtggctgccgttctgggtaacctccagtctatgggcttccctctccttacctctgcgccctctgcctgctcgagtcccctcagtcctcatccttcaccctgcacataactttactgctgcctgtgggtccgcccatcatcccgtgcttatggcaactgcttccgcccatcatcccgtgcttatggcaactgcacgttatctgcaaagcacaggaggaggatggtgctgaacccagaaagaacattactaagaagttaagagtggaaggcttcagagatcacttagttcaggggtaggcaaactaggaccaaatccagcccacagactgtttttacatttctaacatactatttaaagagaaaaagtagcagcaacaaagacaatatgtagtctgcgaagcctaaatattgccacctggccctttacagaacaggtttgtagtccactaattttacagaatggaacactgaggtcgaggggaagtgaggattttcccaaaatggcacaaatgaattagtggcagaaggagctcatatgggctggtggagagtgcacaggatctggagttataagagctgagatctagtcccagctctgccagtacctatgagcaagtgtcctctctgggcctcaatgtccccatctttctttctttctttctttctttttctttttttcttttctttctttttttgagacagagttttgctcttgttgcccaagctggagtgctatggcacgatctcagctcactgcaacctccgcctcccagattcaagcaattctcctgcttcagcctcctgagtaactgggattataggtgggtgccaccacggccggctaattttttgtatttttagtagagatggggtttcaccatgttgaccaggctggtctcaaactcatctcgaaccccatctttctaacggccatgttccgctatctttaaaatcccatgactgtaaactagaacacacatgaggccatgccttggaaagctactgcaggcccgcaatgcttcccagcatatgtactgctcctttgtggtggtgacagaccactgaggccatattggggtgaattggttttacagcattccatctcactactcaactatggagttttctgcctgtgaacaaacaaggcagtatatgtgtgtggggggtgggtggggaggggtgggtggctgtcaccaagccccacctgcctcatgccttctctttggtctctcctctatatagtgccaccctccaaaccagaatgcggcatcgagggagagaccataattgggaacaacatccagctgacctgccaatcaaaggagggctcaccaacccctcagtacagctggaagaggtacaacatcctgaatcaggagcagcccctggcccagccaggtaagggggcagtagggaaggcgggctccccacgtcaaagtgcaacacatgcagctgattggctaggggctgcaacttgggttgaccgatcagatccccctgaaggccgcttgcttccctacccatccctatccccctatccccacctctctaagcactggtttcttgtttttagacagagtctcgccaggtggcccaggctggagtgcagttggcacgatctcagctcactgcaacctcctcctcccaggttcaagcgattcttctgcctcagcctcccaagtagctaggattacaggtgcccaccactatttttagtagagacggggtttcaccatgttggccaggctggtcttgaactcctgacctcaggtgatccacccgcctcagcctctcaaagtgctgggattacaggcgtgagccatcgcgcccggccagcactggtttcttataataatacctacctcataggttctggcaagaaacaaaaatgattcatgtaaagcgcgtagcggaagccgtggtaaatgttaacttgttttctttgttcctcattcctcagttctcttggatgaacgtgccctgataagcactctgtgcaaaagcatgggtaggattttaatttgattgtgtcctgaagtatacatttgagaccccaagtctaactcgggggctccacgcaaaggtggggaatttaactttcccattccttatccaggccggtccctctcagccgtcacggacccccgctgccccagacacaccaccgttttatggctccacacaacgacagcaccatgttgctgtaagggtcccaccttcttaggggaggcgatggtggattcagctatagttgccaggagaccagttttgtactgggcagcttggtattggacctttcagtcaggaaactgaaaaaaaaaaaaaaaaaaaaagaaagagctatataaaaatcctaccatcctttccacacccagagccaatgggtgtggaaataccctggtggagtcccagggcccctagtgccacccctgctcctgaggatcaagaaagacaaggcttgctgggtgccgtggctcatgcctgtaatcccagcactttgggaggctgaggcaggaggatcacttgaggctaggagttcaagaccagtctgggcaacattgtgagacccctgtctccaaacaaaatttttaaaaaattagctgggcatggcaggactcaccctttagtcccagctactcagaaggctgaggtgggaggattgcttaagctctggaggtcgaggctgcagtgagccatgatcacaccactgcactccagccttggtgacagagcgagaccctgcctcaaataaaataaaataaaataaagtaaaataaaataaaataaagtaaaataaaataaaataaataaaatattttttaaaaagaaagacaaggcctgaaaggtgtccatccgatttagcttctgggaggtctttcagttcagtgtaggtggaaaaggaggccagaggtggaaagcaaagccagcagggcacacagctcttctgagaagatgaggtgccccgggggtggggatgaggacccgggggaagaatatctggtgtcctggataagcccagccggacggatgcacacattgggggtgcactcaatccaggaagagctttatcactcgtttgggggcaaatcgacttcttaaaaaagttagtagacactttgggaggctgaggcaggcggatcacgaggtcaggagatcgagaccatcctggctaacacggtgaaaccccgtctctactaaaaatacaaaaaattagccggacgtggtggcggacgcctgtagtcccagctactccggaggctgaggtaggagaatggcgtgaacctgggaggcggagcttgcagtgagccgagatcgcgccaccgcactccagcctgcagcctgggcaacagagcgagactccgtctcaaaaaaaaaaaaaaaaaaaaaaaaaaacagttagtagaatccactcgacctaacttaaaataggtcaatgtaatgtaggttttcaacaagcttccagttgtgtttacgtatttctggttggcaactttttatcgagtgtgtctggaatttttgttgaaaccacctggcagctccccgggggctctgtggcctcctctctctggcctatgaatagtctagtgactccagccatggtcatggtaggtgtgctgtggacactggtagtgtctgatcttctttcctgcaaagtgtgtatatggagacccaaagctgaaggttacaggtggcagatgctataatagctttatacccagtggtgatgtaacacagaagatgcataagaagatcaaagaaggtttctccaaggagtgggtattggagtcgacagtggttaagagcatgccatgggcttgactcctggctcggacacttgttagctgtatgaccttggcaagtgactcagcttctttgtgccttaggttctatgtctatgaaatgggtacaatgctagtgtttacttcatagggttgtgaagattaaataaaagtagatgtgaagcattgagactagtgcctggtaggcagtaagcactcatttaatgctaagtgttattagctgttatttgagttgggtcctcaaggatgaggaggcttggcatggagaacaggaaggaatcatgactgtctggtgtggctaaggggtagggtgcgtgtgtaggtgtaggaatggtgggagatactcttgttaagaaacacagtgatgagaaatcatgaagagcctgtgcgttacgctagggaggttcgtctttgccctgtaagccacgggtaccttctgaggagcctcacaaaggggcagcccagctgcagttctctcctgcctccacagggagactcttctggttgttagaagccaaaacttagttctttcattatccaaaagggagaatcctgaggacaggaaaggaggtgaaaagagaattgcttctttaatttgtgaaagctttaatttgtgaaagctttatcctgtctctagttaagatttgctgagtcagaatggggacctgcaggtgacagaaaagaatatggttaatgtccataacaacatgccctggcatctggagacattgcggggtgagggcagagttctcaaagccttcgtttccactctgctttgcagagccttggagaatctgccaattctggccaggtgcagtgtggctcatgcctgtaatcccagcactttgagaagctgaggcgggtggatcgcttgagtacaggagttcgagacccacctgggcaacatggtgaaaccctgtctctaccaaaaatacaaaaattagcctggcatggtggtgtgtgcctgtagtcccagctacttgggaggctgaggtgggaagatccttgggcctggaaggcagaggttgcagtgagccaagatggtgccactgcagcctgggcactagagccagatcttatcttaaaaacacaaaacaaacaaacaaaaaataaatagagagaatctgctaattcttcttcctctgtgggtcagcccaaattatttctggcttttaaaacatttcagtccaccatggacgatttggagaggagggtacctctgctctcctacatctgaagacaatttccaacattagagattcattcctttgactaaaccctcagtggaaacaagctagcagtgaaaagaacagggaatccagaatcaggaaacaagaagtcctgacttctccactttggagctgtgagtcactcacagcctctcggacccttagtactgccctttgaaaaaaactgggattccccaaaagctgtgaagaggatgagaggagatcccatgtgtaatagctctgaacagactttgtaagctgtgtcccaggaagctgagtttcatgcactgaagaaacaggaatttggatatcaaggaagtgggggagggggtagttctggggcctggagcacttaaggggaggcggttgtgaagggtggggaccagtccaaggaggatcgtgagggccctttgtgagagagaggtggcagcaggggcttgtcgacaagctacaggattgggtaggggttggggggatgcggaaacgttaggtcttgtcaacgtgacattagcgtcttggtgagacaggaggttctcttgaggggaatctctccacagctggagcagaggaaggtgggaagcgtatgaccgtcctgtgcattcccctttctgaccacaaggtgtcgccactgcagcggaaacattagttttctccggatatcagaaattactagtccctttccgaaggaaaaggggcttgggagccccaactcggaatcaaagaaggtcctgtggcacaagacctgcactggttcatcccagcagcttccagtgcacacggtttgcatcagggaactgggggaggatagcgctgactcattggactaggaaaccccatgttccccaccctaaacaaggcctagagctcaaagctggactctgacaactaaaaaagtcctgactgtctgcagtgtgctgcctacactaaatccagagtccgagcttcacactcttaagtggtggggatctgttatgagctctagacctcctaagtatgcccagggccatagagcatttcctaaagtgtgttccttcaagatgcctcttaaaaataacaaatccgattcatttagcaaatgagagcatgaataccacaccccgctgtcagaagttcccagtgctcaacagcattgtaggagctctgaaagtgctgcccttagaaagattacttaatcctaactcagtgattcctaaacttgcttttttagggactccttctccatgccgcatgttaatatcacatgtaaacaatgttccagaaaacatactgaggcgtggaattctaggatagaaggggacacattttatgaagaatgagcatccagagagtagtgtcctgggggtcaagggaagaatttgaagaaagtacaagtgaaaagactgaaagaaaatagcaccaaatcaaagtgttatttataggtgatggaattatgaatgatttttatttgttctctcttctttaaagaggcattccttggccctttggatgagattaaaaccccttgccataagctcagatagtacctccatcttgaactgtaaccatcattgtttcatgtctgtcttctttgggagactggaaacaccaagaggacagggaccctcctcatctcgtttatagctgtgatcagcagctaaagattttctgtattgaattgaattgaaataatagttttatatcatttataaattattataaggagcatacattgcttttatcatacaaaattttatttttatacatatttttttcgagatggaatctcgctttgttactcaggctggagtgcagtggtgcgatctcagctcactgtaacctccaccacccaggttcaagcgattcttttgcctcagcctcccaagtacctgggactagaggcgcacaccaccatgcccggctaatttttatatttgtagtagagacggggtttcactgtgttagtcaggctggtctcgaactcctgacctcaagtgatctgcccgccttggcctcccaaggtgctgggattacaggcgtgagccaatgtacccggccacaaatttttaaaagaaaattatcaatggctccagggagttctagacctgaaacaggatttttgttcctgttttataatttcttaattttgtgaccttgagcagttcacttaacttctttaagcctccagttaactccatgaattggagattgaaatattgaggattgctggaaggatgaaaggacatcacatttgaggatgtgtactgagcagcacatccggagaaggaaaatcttgagatgcaatcttgcaggaaagtgacggtggggcggagagaggacaactcccctggttttgcccctagcaccaagtggcaagaggcaaagctggtatgattgacagggccagatctgtgacctgaagcttggacttgttactgaggattacgtctagtggttgctgggcagcccctgaaatgtctgaacagagcagtgacaggatcgtatttacaatttagagcgtctcttagggatggcgtgtaaccacctggtggcagcagggatcaggcaaggctggctctgcagcaaaattagaggaggtaggtctccagctcctctcaaaatagcagttataacaaagcatcttggatggcaggacatatacatatgcccaagcacaaagctcttgctttcaagatgaagaaattcataggatgatagattgaggggaaaggtcttccatgagatattctggtccgttctcttcgattcaggaggatcaggtgttttcactcctgctttccgaaggaagcctacagctcaaagaagttaaatggcttgctcaagtggcggcagatgtagaggaagagtctagacagtctgcctccgtcccaccccaacagcacacacattcaccaccccccataccacacacactacacatgcaacacacaccacacatcacacaccacacacattacacccaccacacaccacacatcacacactgcacaccacacatactacacacgccacacacaccacacacagtacacaccacacacaccacatgcagcacacacactacacacaccacacacaccacacaccacacacacaccacacacattacacactcaccacacacactacaaacgctgccacatacacaccacaccacacgcaccacactacacatgccacacacaccacacacacgccatacacacaccacacacaccacatacatcacacactacacacacactacacacaccacacacccaccacacaccagacacatcacacactcaccgtaccacacacactacacacaccacacacatcacacactcaccacacacactacacacaccacatacacacataccacacatatgccacacacaccacataccatacacacactactctcacagagcacagcacacacacgctgcacatcactgacacaccacacaccacacacactgacacaccacacacactgacacaccacacacaccacataacacacagacacacacacacacatacaccccacacacctctctcatggcagaaatccagagatcagagtttttgatttccaaaggcttctttcatatgagtctaagctaagagatttggtttctgaagatcataaaagtaataatatcttctgattagaaagcattttcatgtaatacataatgtgcattatgtttcctgagcacttactacatatcaggcattctgttgtgggcttatatttattattagtacctcattttatgcttgcaagtaccctgtgaggcaggtactattatttctgattttagatgaggaaatggaggttgaatgaagctgagttacttgctaaagacaaattaataagtggcagagccaggtgtcaaacccagggtgcctgactgaattctgagcacttcacattgtgggccctgcctggtttaagcgtcctgcagccctggaggtggacatggggctccggcctgaagaagctcagtggcagaggttgtgcttcccaaggagtccagacctcccattcctggctgtctccactccactgtagtgcctctcttcaccctgactcttcttcccctgcagcctcaggtcagcctgtctccctgaagaatatctccacagacacatcgggttactacatctgtacctccagcaatgaggaggggacgcagttctgcaacatcacggtggccgtcagatctcgtaagagcagcctgcggggggagggctgacaaacgccacaggataactggtgggggtccagaaagtcagctgagaccaccgtgaggaggaataggggaacctctctagggccacgcacctgcaggttagctgtggtgacctaggcaggatgactctgtcccaggctcccctcactctgaggccagtccagttccactggtgtttggaagtggaacctaggactgacttctaggactcagaggctttgtcagtcccacctgcctaggaaccactcggtgggcgtggaggaagtgcccagggcagctgccgcagagtctggaccacatccttctggggtgagacaccaaatctagcttaaagagctggctgggctgacatctgaggacttttgcagagccagggtagcccggaaagtgttaagatgtgaagtggaccatatgtctctgtctgcacctccatcctgaagaatattcctgggccatggctggtcacattcctccaagaccatgcctttcatggagtgttaccagaagctggtagctgctgctcccctggctgggaggagacccggagctagcttagaagctcggcaagtgcagctgctctgtcctcttgcagcctccatgaacgtggccctgtatgtgggcatcgcggtgggcgtggttgcagccctcattatcattggcatcatcatctactgctgctgctgccgagggaaggacgacaacactgaagacaaggaggatgcaaggccgtgagtgtctgggctggtagcctgttggaagggtctggggagactggaaatatgcttcccaattcctcacagcctcttctacttgcagcaccccttggggtatatcacccccattttgtgctgatgaaacaatgacctgtccaagccataaaatgtgcattgcagccccaggacctgcctcccagtcctgtggttttccagtctgggagctcagggccgggcttcctgtggcatgactagagccaagtgtggcctggagcccctgtcacggggccagttcctcctgggctggtaaagccagcctgttcctgtaaccccctcagctcatgcgtggaacaagtctgtggcacctttactctcagcccagcctttcagcccagtgtcctctgcagctggtgggtggggaggaggtctggaggctgctcttcctgtaatgcacatgaggcccagctcccttgagggtccacctgagagcaaatccttcccctctgtcccctgctgccctgcaggaaccgggaagcctatgaggagccaccagagcagctaagagaactttccagagagagggaggaggaggatgactacaggcaagaagagcagaggagcactgggcgtgaatccccggaccacctcgaccagtgacaggccagcagcagagggcggcggaggaagggttaggggttcattctcccgcttcctggcctcccttctcctttctaagccctgttctcctgtccctccatcccagacattgatggggacatttcttccccagtgtcagctgtggggaacatggctggcctggtaagggggtccctgtgctgatcctgctgacctcactgtcctgtgaagtaacccctcctggctgtgacacctggtgcgggcctggccctcactcaagaccaggctgcagcctccacttccctcgtagttggcaggagctcctggaagcacagcgctgagcatggggcgctcccactcagaactctccagggaggcgatgccagccttggggggtgggggctgtcctgctcacctgtgtgcccagcacctggaggggcaccaggtggagggtttgcactccacacatctttcttgaatgaatgaaagaataagtgagtatgcttgggccctgcattggcctggcctccagctcccactccctttccaacctcacttcccgtagctgccagtatgttccaaaccctcctgggaaggccacctcccactcctgctgcacaggccctggggagcttttgcccacacactttccatctctgcctgtcaatatcgtacctgtccctccaggcccatctcaaatcacaaggatttctctaaccctatcctaattgtccacatacgtggaaacaatcctgttactctgtcccacgtccaatcatgggccacaaggcacagtcttctgagcgagtgctctcactgtattagagcgccagctccttggggcagggcctgggcctcatggcttttgctttccctgaagccctagtagctggcgcccatcctagtgggcacttaagcttaattggggaaactgctttgattggttgtgccttcccttctctggtctccttgagatgatcgtagacacagggatgattcccacccaaacccacgtattcattcagtgagttaaacacgaattgatttaaagtgaacacacacaagggagcttgcttgcagatggtctgagttcttgtgtcctggtaattcctctccaggccagaataattggcatgtctcctcaacccacatggggttcctggttgttcctgcatcccgatacctcagccctggccctgcccagcccatttgggctctggttttctggtggggctgtcctgctgccctcccacagcctccttctgtttgtcgagcatttcttctactcttgagagctcaggcagcgttagggctgcttaggtctcatggaccagtggctggtctcacccaactgcagtttactattgctatcttttctggatgatcagaaaaataattccataaatctattgtctacttgcgattttttaaaaaatgtatatttttatatatattgttaaatcctttgcttcattccaaatgctttcagtaataataaaattgtgggtggaaattctta

SEQ ID NO: 714 - DNA, 89378 bp, Homo sapiens
cccacgattctaacttgcatgcacctaagtggcagtaggtttaggatgaaagtggtggggcggaggccggcggtcctcgcccgtgccctctgcacccctgtcccgaggccgggatggccgcgcccactctgggtaaatttcaggagggcctacgcggggctggagaactccaccgggctatgcgaacagaatcctgcgaaggtcggcattaaaggaatacgcaaaatcagcgttgcagcccccgcggcttaaccgcatctatttttatatctaagccaaggtcactctttaataccaggccattgccctgagctgggcgtcgcgctgccgggtgacggcggccggggcggagagagggggcgcgggtggcgaggcgggggccgcgtgacgcccccgggctggccaagcccgcacctgccgggccggcgcctgaaagccggggctggagggaggcagggcggcgtcccaggctccgaggaggggccgctccgcgctggcgggcggggggattcgcggtgggcgcgggcgcggagcggaagcgaaggctggaggcgctgcggcgctagtgcgtcacgtcgtcggagggcacggtgggccgcggccgacccgcgacgaggagccgggcgtccggggcgagcgggaggcagccgcactcgccctggcagccgcgagctgtgcggcctgggaccggccggaggtcgccagcgagcagccgccggctccattcattcgcgcggctccgcctcctttcccgggctcttccagcggctcccggggcgcgtctgaggtgagtgcgctccctctccccggcgcggaccgctgggtgaggccgagacggccgcgccgggccccgcgcccccgccagcaccagacccgcggacaccgagcggcgacgcgggccaccggctgtgggcggcccctgcgggctgggcctggcgcagaccagtgcgggccgcctggacccggggctcgcgtccagctggcggcggtctgcggggatcccgtagggcgtgtggcgcccccaggtgcgccggcctccgcctcggcgccaccattttgtgtgagggaatgcccgtcttcgctcgcctccgccgcgggccggttcgcagctgcggcttgccgccccctcccctcgccctctccccacctggatgcttggcgtgcgagctgattgctttggcttggggagacgcggactcggggaggtgtggaacttcagcgtttagactcggttcacccgaccaggtggcctccagagatgctctgaccgccttcctttacctgtaactacttttggaacagatattgtatgattctccctcctctggaatgctggtcgttgcagttttgtcctaattgtgttctcagctctccattatgccatttttcaagaggcctgtgcctcaggaggtgaagccttgaaccctgggtggtttatggctcgggggtctggattacactgactcccatgactgtccttggggagaaaggatgaagcatctcactggcttttcagcgtctgggaagcggcgtgggtatcgtatcgggtggattcgaagataaccacctgatgcaggtcaccttcccccgctgggagagccgttcctaacgtaaattaaaacgtgtgtacgggtttttgggggattgggaccggagggacatatttctaaaaaatttccagaagggaaagttttcattgtgattctcacagaactgtgacacaatttgtcattttcaaggttcctgagaatttgggaattcttttaattcgttggcttcttgcgaattactacttacgaactgagcagattatacccaagccatttatattttgtcattgcatcacagacagggattacaatcgggagtgctggctgttgcataatgcacacatttgggccctggagggaattcaccgaagtggatctgggtttggtgtgccatgcgtttttattttttacacaggatgtacagatgatctttgcaaactacgtcccttatcgtgctataaagtgtttacaagaggaaagatttttattgactagtatggaccagactaaaatttttagtgttttagttttgcttgttttggaggaaaggcaaggaatgagatggtgagaggcacctgggaaaagtccgtttatcctaacacttgaagcgcaaacaaagataaaacatgatcgtctttcacagaaatcttgtagctattatagtggacttttctctaagttaatgatggggatctgtttggggaacttagaaatagcttatgtgagtagcaacattgaccttccacatgagtgaccataaattaaggtgttttacctgtggattttaggttctaaaaggcttcaaattagtctgacctttgagatagtattcatgtcattacaagtggtatttatttaataaagatgggatataggccgggtgcggtggctcacacctgttttcccaacactttgggaggccagagcgggtggatcacgaggtcaggagttcaagaccagcctggccaacatggtgaaaccccgtctctactaaaaatacaaaattagccgggtgtggtggcacatgcctgtaatcccagctactcgggaggctgaggcacaagaatcacttgaacccaggaggcagaggttgcggtgagccgagatcgtgcccttgcactccagcctgggcaacaacagtgaaacaccaagatggaatatatatccaacaaaggattttgatttggagaaaacaaaataattaagtgcttttgaggtaaagtttccatgccatcctccttattaaattaaactatttattttctgttttgttgaagactctcccactaattttgtcttcaaacaagtgattacatattgtgtaccatccctggcaaaaatatcgtgcttcccattatagatatgtttattctatagggagaattatggaggcgagaagaaccttggacatttagagatgagtcttggtttagggaatttaagtaagcaaagattgcctgctagagattgcaggtgacctgtctggacctatcctaggcctatggggaatgagatttttttttttctagcaaataacagtgctgagtcaaacacaactcttaaacttttacattgattctgttattatacaagtcagagaagttcactgaattggtaagattgtattgactccagtttggaagtgatcttggtgtgcttttgtctttgaagttgcttgagattttgagcattatttaccaatggttgagaaattgaaaagaaaaatcgaatatttttctctattagctcctacctaaatactccgttttaagccttaagcatactatgttcagtcatctgcctaaaaattcagtaagatttactttttaaaggtaagtacaacataagagagttgagtattcatgtagtggttcccacaatatctgtcaaggattctgtataaaggattgttgtttgggtaggaagttaaacaaaacttgtatgttccttcccctaagattttatgattctaagtgaaaaaaggaattgtgtgattattgtatttaagacgatagtctcttcacatgccattattttttgtatatttagctctgaaatttaagttctaaatttggtatgcctcagtggtggtaggaatatttcacaattgtttcaatgataacaagaaaatcacttaaggtagaatttattaaggaaaaggtgtgatgatttaaagataataagggaaaaactaataatttatcagagatatcctagaatgcttattagactcatggagttttagagttggtatatgataccttaacgtttacatgctctgtataggggactactcatctatgctaacctattttttaggctagaaagtttgtgacgtacctagattcctcccacccctgccttttttttttttttttaaatgaatacagttttggttactagctgttccaataagatgctagttttagactaaacaaagatagctttcatttattccacaaacattgagtgtctgttgtgtgttgtaggtcacaaacaggccctactgtcacggagtctatagtttagtgaagtattgtggattacaatgttaacaattccttaaggtctaactgtacaaagatttttgaaaatacgagttgggaacaaatttagcaaattgcatttttaaaaaagcgccaagttgcatgttgtcacactttatttgtaacttctcaggtatagaattagtttaatttggaaaattcattccagtagtccttgtaaggtgtactgttaggctgggtacaaaaacatgaatgtgcaaagtaatctagaaattcagtcttaaagatgagacaaacattaagcagataattctgtcctgtgagtgaactgaacaaagtgatatggggcatgccgaggagggctgcattaattctgtctgagtgactctggaagggctttacagaggcagtgacagttgaacttggtcttgaacaatggatgagtgagaacttgtcagaagcttttggggatgtgggatatgacgagagacagtcccagcaaatgctaaagcatagagttataactggtcctgttctgaaaacagggaagtcagttgatctggcccaggtcccatggtgggttggggcctgattgtgaatggatgtgtatgagttttgctccatggtgatggggaaccaataatgggttttcaaaggaaggaatgaacagaatggggttctctctctctttttaggaagagcattccaatagcagtttaaacgctggattggagtggagaaaagatacgagcttttatgataatcttggcaaagccttgaagcaaagctgtggctatggaggtgacagaggaggggctagagttgagacacatctgctgcagtagaaaggcagtatttgaggtggaaagagatgtgctttggtgtcacacagactggatttaagtcagggcaccagggctctgttgccatggttgtataaatgagggatagttacttaggcttggcctctttagctataaaatgagtatgagacatgccttgcaagcttattgaaatgactagaagtagtatataaagctcattggctgacgtgcataatgataatatcacccaattttgttaatgatatcaatgaagagttgtgttaagggaaaggatgacttcaataagttttagcatacaactgggtaggtggttgctttgttaacatacaatgtgaggagaggaagaagagaggattgtagagggagagaagttaacttttttttttggctcactgcagcttctgccttctaggttcaagtgattctccttcctcagcttccctagtagctgggattacaggtgcccatcagcacgcctggctgatttttgtatttttagtagaaatggggttttaccaggctggtcttgaactcctgacttcaagcgatctgcctgtcttggtctcccaaagtgctgggagccactatgtctggtcaactttggatatacgttatttagttttgggtttcctgagggagaatccaggtagaggtattgcgtgaactgttgcaaatatgaatcaaagatctaggcagataatagagatttgggagctaccagtgtatatatttggtaaatggagccagtagacagggtaagatttctaagtaagagcaagtggaataaccaaggcttatagttaggtgaaatattataagttaaaatgttaaaaggttccttgaagtctaaatgcacacaatttttgaaaatacgaattgggaacaaatccatttattagactgtttttatttttgaaaaggagcctcactctgtcacccaggatggagtgagtggtgcaatctcagctcaccgcaaggtcagcctcttgggttcaagggattctcctgtctcagccccctgagtagctgggattgcagatgcacgccgctatgcctggctaatttttgtactttttagtagatacggggtttcaccatgttggccaggctggtctcaaactcctgacctcgtgatccgcctgcctcgacttcctaaagttctgggattgcaggcatgagccactgtgtccggcctagactttttttttttttttttttttttagtgctacattgcatttggagggatccctgcatttatggattgtgcagaggagaggggtcagttgctgaaagaaactaagaagaagagagagaagaagaatatttcacctaactataagccttggctattccacttgctcttacttagaaatcttatcctgtctagtggctccatttaccaaatatatacactggtagctcccaaatctgtattattggcctagatccctctccagaaagtcagattgtcctgagtgtcaaggaaagacagaaacttttaagtgacagaaggtggtcagtttggtgtagtctgtcataaggtcaagaggagtaagaatgaaaataatcaattgaatttgggacttggagggttattggagatcttatgagtaggagtattaatatagtgataaggacagaagccaatttagtaattcatagaagtggagaaaaagtcagtgagtttgacttattgttatgtaatgaaagataaagtactaaaccatattagtaaagaattttgtagtctaaaagcttttatacatgtatgccagtgctttcaagtttggattggcttgtgatatacctgattaatttattctgatacttccatcaacagtagttactactcagtgcagatctacagtttaagcccataggcataggtttgaatcctgactttgctgtttctagctgccttttattaagatactgaatctctcctggcctcagtttcctcatctgtaaaagagtggttattacagaatttatctcaaaatgttgttgacagaattacctcaatgtgataatgtattaatggtgagctactaatatcattatcagtggaattaggatagcttttagtatctagttcagtgatcctcatcttcttaccttttctcccttttattatctctctacacccaccccatgtaccatgtatgacacttcgttgaggttcttttcttttctaatagcgatggggtctcgctttgttgcccaggctggtcttgatctcctggcctcaagcagtccttctacctcagcctcccaaagtgctgggattataggcatgagctaccatgctcagctgaggtacatttcaaagcagttatttgcttccttatttaaaaaaaatcgtgatgtatctatcactcatcaatcacagcttttgatttacatgagatatagtataaccacaagttgagttgatagaaatgttaaaaattaagaaaaccttcgccgggcgtggtggctcacgcctgtaatcccagcactatgggaggccaaggcgggtggatcacgaggtcaggagtttgagaccagcctgaccaacatggtgaaatcccgtctctactaaaaatacaaaaattagccaggcttgatggcatgtgcctgtaatcccagctactcaggaggctgaggcaggagaattgcttgaatccaggaggtggaggttgcagtgagctgagattgtgccacggcactccagcctgggtgacagagcaagactctgtctcaaaaaaaaaaaaaaaaaaaagagaaaaccttcattttttgttagtttgtgtattaatgtaggggaaatgtatgttttttggtttttctttttttgagatggaatcttgctctgtcacccaggctggagtgcaatggcactgtctcagctcactgcaccctccgcctcccgggttcaagcaattctcctgcctcagcctcttgagtagctgagactacaggcatgtgctaccatgcctggctaattttttatatttttagtagagatgggttttgccatgttggccaggcccatcttgaactcctgatctcaggtgatccacatgccttggcctcccaaagtgttgggattacaggtgtaagccaccatgcacagccttgttttgtttttaaaaatggaaaataattaatgttagccccctctatagcttttatggatcccaaactaagaggctgtcttctaattttagatatggcattgttctgtattatttatactcatgagtggaaaatatagctaaatttagcaaaaaagtacccaaatttttttttactttttaatttttcaactttgattttaggttcgggaggacatgtgcagatttgttaaatgggcgaattgcgtgttgctggggtttggtgtacaaatgatttagtcactgaggtagtgtgcatagtacctgataggtagctttttgacccttacactcctcccaccctctaccttcaagtaagccctggtgtctgttgttcccctcattgtgtccatgtgtacccagtgtttagctcccatttgtaagtgagaacatgtggtattcggtttttcttactttgttaattcctttaggataatagcctccatctgcatgcatccatgttgctgcaaaggacacgatgtttttgtttgtttttttgtttttttgagatggagtctcacactgtcacccaggctggagtgcagtggcgtgatctgggctcactgcaaccttggcctcccagcttcaagcaattctcttgcctcagcctcccaagtagctgagattacaggcacctaccaccacgcccagctaatttttttgcatttttagtagagacggagtttcactatgttggtcaggctggtctcaaactcctgatctcgtgacctgcctgccttggcctcccaaagtactgggattataggcatgagccaccgcgcctggccttgttctttttttttttgactgtagtattccatgaagtacccaaattgtagacatcttgatatttggctttagaatataatacatatctaaaaatacttgaaattaatttcaaaccatgaaagaggaaatagaagtgattctgaataaattttgtttggagaatactaatttttttgtatccgagtagcatctatggatggaaaaaatggcatactggcttggatagacccaagggaagttcttgtgcctgtgacagtacttacaatgggcagagagaagtttctcctgtctctagttggaaacataccaactgtaactaacagtattctttgactagtttgttggctggtcatgttttcatgcactgtaattaattcatttttgggtagaatttattgttggaaagtctcagttcttttaccctttaaagatatacagaataagtctaaacttctaaacttttcatcagcatattgtttcttcaaatattttaagggaagttttttttttttttttttttttttttttttttcccgcggcaaggtctggctctgtcacccagactggagtgcagtggtgcagtctagtcttgactcactgcagcctctacctccctgcaacctctgcctcccggactcaagccattctccctcagccccctgagtagctgggactacaggtgcgtaccaccatggcctgtaattttttgtattttttgtagagacggggttttgccgtgttgcccaggctggtcttgaacttgtgagttcattggctctgcccaccttggcctcccaaagtgctaggattacaggtgtgagccaccatgcccagccaagggtagctttcttgcttcccttccccagtgagaattatttctcccaatttcagttccttatctggtgtaccatggtttcaagatcctttgccctcttggccttctccgttggaggcattccagttttgcagtgtgattttttttttttttttttttttgaggtggagtctcactctgtggcccaggctggagtgcagtggtgctatctcggctcactgcaacctccggctccgggattcacaccattctcctgcctcagcctcccgagtggctgggactacaggcgcccaccaccacaccaggctaattttttgtatttttagtagagatggggtttcaccgtgttagtcaggatggtctcgatctcctgaccctgtgatctgcccacctcggcctccaaaagcactgggattacaggcgtgagccactgcacctggccttttttttttttttcttaaaatgtgccccttggaagggaataaaacactgcagatactgtctgatccatgaaaaatgtagggatgtttttccctccctagatggaaaatttatttaatcttaaaaaaaaccttggttatggttcatatttaatctagtatcatctaaatctcaaggtcttcttttttgtctctgtccttcagcaatggatgattaaaaaactatagtgcaatgtagtgtattttatttttcccctagctctattttggagtaactcattaaataaatatttgtccaaacaaaatacctaggaataaacttaaccaaggaagtaaaagatgtctgcaatgaaaactataaaacattgatgcaagaaattgaagagtacataaaaaatggaaagatatttcatgtccatatattggaagaatcaatattgtcaacatgttcatattacctaaagcaatctacagattcaatgcaatttctattaaaataccaatgacattcttcacagaaatagaaaaaaaaatcctaaaatgtatatggaaccacaaaagaccccagaatagccaaagctatcctgagtaaaaagaacacaactggagaaatcacattatctgacctcagattatactacagagctgtaataatcaaaacagcatggtaccagcgtaaaaacagacacatagaccaatggaacagagtagagaacccagaaataaatctgcgcatctacagtgaactcatttttgacaaaggtaacatgaacatacactggggaaaggaaaatctctttaataaatggtgctgggaatactggatatccatacgcagaagaatgaaactagacctgtatctcttgccatatacaaaaaccaaatcaaaatggattaaaaactgaaatctaagacctcagactatgaaaccattaacataaaacattgggaaaactctccagggcataggcgtgggcaaagattgcatgagcaataccccacaagacaggcaatcaaagcagaaatggataagtgggatcatgtcaagttaaaaagcttctgcatagcaaaggaaacaacaaagtgaagagacaacccacagaatgggagaaaatatctgcaaactgtctatctgacaaggaattaataaccagaatatataaggaactcagacaactcaatagttgaaaacatgtaataatctgattaaaaaatgagccaaagatctgagtagatatttcctaaaaaaagacatacaaacggcaaactggtatatgaaaaggtactcaacatcattgatcatcagcagaatggaaatcaaaactacaataaggccaggcacggtggcttatgcctataatcccagcgctttgggtggccaaggtgggcagattgctcgagctcaggaattcgagaccagcctgggcaacatggtgaaaacccatctctacaaaaaataccaaaaaattagctgaacatggtggtgcatacctgtcgtcccagctactggggaggctgaggtgggaggatctcttgagcctaggagatggaggctgcagtgagctgggattgtgccaccgcattccagcctggacaacagagcagaccctgtctgaaaaacaaaagcaaaagccaacaaaaaacaaactacagtgagatatcatctcaccctagttaaaatggctttcatccaaaagacaggcagtaacgaatgctggtgaggatgtggagaaaattgaaccctcatacactgttggtgggaatgtaaattagtataaccactatggagaacagtttaaaggttcctcacaatttagaaatagagctaccatataatccagcaatcccactgcttggtatatacccaaaagaaagaaagaaatcagtatatcaaagagatttctgcactcccgtgtttattgcagcactattcataatagctaagatttgaaagcaacgtgagtgtcaatcatcgaatgaatggataaagaaaatatggtacatatgcacaatggagtagtattcagacataaaaaggaatgagatcctattatttgcaacaacatggatggaacttgagatcattatgttaagtaaaataagccagacacagaaagacgaactttgcatgctctcatttatgggagctaaaacaattagaacaattaaattcatggagatagagagtagagtgatggtcaccagaggctggggagggtagtgggtggtgggaggaagtgagtctggtcagtgggtacaaaaacatagttagattgaatgaagaagatctagcacttgacagctcaacagtgtgatgatagtcaacaatgtattctacatttaaaaataacaaagtgtgattgggttgtttgtaacacaaaggataaatgcctcaggtgatggatgtgattattattattattattattatttttgagatggagtctcgctgtgtcacccaggctggagtgcagtggtgcagtcttggctcactgcaacctccacctcctaggttcaagcagttctcctgcctcagcctcttgagtagttaagactacaggcatccgccaccatacctggctaattttttgtatttttagtagagatgaggtttcaccatgttagccaagctggttttgaactcctaacctcaggtgatctgcccatcttggcctcccaaagtgctgggattacaggtgtgagccactgcgcctgacctatatatgattatttaccctggtgtgattattatgcattgtttcctggattgaaatatctcatgtatcccataaatatatacactgctaggtacccacaaaaattaaaaataaaagatatattgggtaggcattttacttcatcagtttttatgtttctttttttttttaacttcagctttaaaacacttggcttcatttttattgtgtagtaaccatttaaaaattctgaagaagattagccgggtgtggtggcaggtgcctgtagtcctagctactcgggaggctgaggcaggagaatggcgtgaacccgggaggcggagcttgcagtgagccgagatggcgccactgcactgcagcctgggcagcagagcaagactctgtctcaaaaaaaaaaaaaaaaaaaaaaaattctgaagatgggtcacagtgattagatatagaaagtccgaagaaactatattgcaaggtttgaaaacacttaactcctaagcagagactgaataatctggttgttacattctttaattttattacacttagatacatcatggattatgttggcctgttgtcttgacctttaaacctggccaccaggttaaacccctctggagacagattgcctaggctcagagctggacttggccacttcctaactgtgtgaacttggacagcttacttaacctctccacatctgaggctcctcattcagaaagggtgtataggaatacctgattcataggatcatttcgaggaatgagatgtgtagagtgtttcaacacaatgcgaggtgcaagataagcaatcagtaaatggtggttctcttgttattatcatcagaaaatacattctgagtttaaaaaaagattgtaaatgacattttgaggttattatccttttgtaaattaagacctttcttcctagcttccatctccagctaagctataagtgcttggaaggaaagtaatccattgtagacctgtatgttattaatgagaagggctatcagtgatcatttggctcatcctcactttttacatgtgctgaaaaagtagattctttctctctggaggtctgagcctggtaggagagacagatgaagaaaaatgaaccacattattatgtattatgtattgttatgtgataagtatattaaaagatttatgcacaaggtacttaccatagcagcacctcaacttgtctcccttcagttcttcctaccaatccaacctatatgtagctgtcaggtaatttgtcttaaagaatagccttgaatgtctcttccctgcccaaggtcccttaatggcctgctgcttgtataccaagtgaagtctaaattctttaatctgggattcttggcctgctatgttctgtccttaatttattttcctagtacttccaccaccatttgccgttatataccttaactctcttggtaaatccaactacttgccgttctcggtgtactttcagtcatccattcagcatattctttttgagggtcttccccactatctgcctcttgaaaggacatctgttactttttatctagcagcatgttcttgttcatctgtggcagctcttcctcctagcaccagtgtttggtttatttatacaaacttttattcagtcattcatttatttagtaaatatgctttgaagttagataagactactgtctcttgtaccttcttcccatgggcctgctgccaatgagaggtaagaattgtactgaatctgggtaaataagcccacctgagtttgcaagagagtagcacaagcaggttaatgaggccatagctccaagtgcagagttggagaggcccaaaagcacagaattggagagcctgtggttcaggggctgccatttttccaaattgctgagatactctgctatataatggcagcccatggttatatttcttagttgtctagtgaaaatactagggagtttggtcgggtagtgatggggattgtgactcagcagaatatttcgcaaatggtatgccaaaattaagtgccaagttttggtttctttttgcttttgttgtgagttagacatgtttcctttaaaatgaaaacatcagtcttcattgttctaaatgagacaaatctctgtgatattttatgttaaaaatatctacaacagtgaacatatagttagactcgtgtttttaaaaattggttgtatcctggaggtttactatgtccaatccctgttaactttactaaagtccctgtatagtcagatacgtggtagagaagccaggtataatgtaagaaattttatattgtcagtgttgaaatggacacaattttatgatttattaatttaagtgcttattttttctttcctgagctttgtacactgctgatttataaagagtatttagtagtctgggttgtgaagtaccagagttgctgacatattccacaggcaaatgtattactttactgtactacagtatgtagtaggatcatgtggaagcttcaattacaagcccatttctatttctttctctcttaaatatctattaatttattgttaggcttttgcaaatgtttcgaggcaagtaagtagcattctctatttcctgttcatagaatatagatattaagataatgatttatcatccattcctgggtgtggtaattcagtatgtattttgtgttccaactgttgagcacctttgaaataactttatgagtttcatttcagccttatgagtcctgctttggctccccagggtggaacactaaaaattgatattttgtctcccttggaattaggatggaggcatgtaacccaaattttgcctatcacaagataggccgtatccaagagagactgcactacgaagtgagctactggaggaaggaggccctaaggggaattgactttcttctcttgtgtttcctgccttggggccctctctcttcttccttcaccttaccaggagtaattactgttaacactataatgtatccttccagactttgctgtacagacatattaatcttttaaaaaacttagctgggtgtggtggcatgtgcctgtattcttagccattcaggaggctgatgtacgaggattgttgagcccagaagtttgaggctatagtgagctatgttcgtgccactgcactccagcctgggtgacagagtgagattctgtctctaacaacaaacaaaaacaaagcaaaaaactaatgcaagtaggcattttttcaaaaaaagaagtggtttgtttttcctgttttatgaattttctattcatgacctttgcttatttatttgcatcttagcttttaaaaaaaacactgcattattcatctgtattaaggtattagattgtataagtcatactggttataatttgcctctgagttttttctttttagatgcaaaagttttgattgatttctagttattagttgcagcagtttattcctttctcaaccagaaggaattttcctctatgtgttctgtatgttcaggtaatttgcccatggttacatagctagtaatcctgttagtttggctcaagaatacactcccttaaccagtattttataccagctttcacacactctcaaaatcctttgcaatatagctggattttgcttttgaaggcctaaaacataccaaatacgcagtatcttcatgcttaaatgatttcttatctaggagtattttcctgtacatgaagagagaattaaaccttgagttggaaagaatacttggaacacttcccctgacatatattaagcaatctttaaccgtattagggctgcctgagatgctgtgctttcagacataccaatgtgatggaaaaaaacagacatcggagtccgactgccgggttcaaatactagctctgctgcttactagtagtgtggccttgaacaagttactcagccactttgtgtctttgtttccttttcggccaagtgaagagaattaaaacacccacctcatgggttttagataaaagttacatcaggtgatacacgtgaagtgttcggaatagaacctggcacatagtccactatcggattagtggttataacttcaaaagatggttttgcttcctgcttgaaataaggagagccaacagatatgaatcccattcaacttcctgctctattacctaatttataggccgtcctaacccatacataattaaatgtttttactttcccagaaaacagaaaaggattgctgaacagtgttgaggcccatctgagattttgatagttgtagcagttattttgtcatattcaaaaactcggctctcatagtagaaaaagatgagtggttagaggaatctagcgtttaggaccttgtgtagggcaggagtgatggaagaaaaagtaaggtaaagggattagttgagctgatgtagtacagggcccaggttaattagggaaggaaatgatgttagaaaacagaaaagggagggatcaagagaggaatcataataaggttcagaaataaggttgagagcattgctgattatgttgcctggatacctaacctattctcggtgttggagagaccattgtgagagttaggatcatgaattggattggttgagataattatttttttccctgagaattctttcagctctatagtgtacatacttctttttgggtctgcctctctccacaaagcccccaaataatagcagtaacctgtaagaatcatgaaataacttacgagctgaacatgtagaatatgttcccatcttttcagaatatagttggcatccagtaatcaacaataaatagggaaaaaatcacaataatataaatttgttttctaactcttttcatgcttttcttaaggttatccattctgtcaaatacataatttttttgggaaaaaggaattattaaaaggtagatacaatatagcagatgctcatgatcttagatctcttatataagaggtcttggtattatgtttttatacagcttaccctggattaatgagcataccattcgcttaatttgtaaattagtttggacactttttacacttcgctgtccattctgtgtcagttttttgatgagttcacttaaggctacattaagctttctcattcatgtagaatctagttaggccttttggtttatctcatggacagagcataaagtacttgacagaatttgatctgacagctttacagttacataacatagaacagaagcttaaaaacaacaaaaaagagagagaagcaagggatttatcatagcaacctatatttctctctggaactttaccacccttccgctgcctctctaaactatagtagcagaaccactgttaggcttgcaatttacatagtcttaaattaaccaagactcaaaaacaaacaaaaaaaacaattccaagcatttagaggtgaaaaggtctttaggattatcctgtccagttgcatcacgttaccaatgagagtacagaagcctaaagagggtaagtaacttgcctatggtcataaagctagttagcggcagagctgaccccagagccaaggtcacagaattccatttctagtgctctttctcgtgtaatatgtgaatagaatatttaataatataatcgttatattttacaaaagaaaatgttatgtaaccatgacaaatactatatttgattttgcatatttaataaaaataattatatttaaaagtatatctgattgcctaggttcatatttctctagtcttactagtggtatgatgttagtcaagtctcttgaactccaaaactgtttcttcatctatcaaatggggcagataggagttccttgttatatagtaaatgtgacagtctctctaaagcctgataaagggatatttctcaataaatgttacctgctgctgttactgatttataataataatttctaattctttcatcttcctttaaattcgaataaaatttagcactgagaatgactggaaacaaaagtaatggatttcagaacagatttgcaaacataaaaatattttagaagagaggtataggtgtgtgtgtgtctgggcctttggaattagggaagtattttccagtttttttcatattaaaagctatgatggatacagttgtttttaaaccgtgttcagaaatcacaacatttaactaaggggtttctcccctggtgctcttctgtatgcaaatttgaggttatctaaattgtcagactctgggacacagggttgttttgtatttaagtaacattttgtatatgaaaaaaatctttgacagtaataaaaataagccgagaagtcattttttctgttaaaaaaccttacttgaaaaagagaatgaagaatcactaatttctgttttcacactttagtgatattctacttgcctttgatctgtagtagtgtgtttttgtatagtgctgtgttttctaatgtgctgacatactactggcgatttggtagatatttttagattatattcaggtgaacatttaaattataggaaatttaatgctgattaggaaaatgtataatctaatataccaaattggtggtttcataggtcttaatatttttccctttattgttgtacccacatgcaagtcttaatagtttagggttaataaaatgtttctaaaaaaatgagttgagattctgatacatgctacaacgtggatgaactttgtgaccattatgtacagtgacataaacgtgacacaaaaggacagttattctataatttcacttaaaatgttcctagaatagtccaattcgtagacaggaagtaaaatagaggttaccagggggtggtggggggaaggaatggacagttaatgtttaatgggtacagaccatgtttggggtgatgaaaaagttctggaaatggatagtggtgctggttgcacaacattgtgagtatacggaactgtatacttaaaaatggttaaaatggtaaattttgttatgtatattttaccacaattataaaaggggagcagggatgggatgagaagaatgcgttttggttttttgttattttaagtgaattgagaaaaatattatatagtgataccggcacttgacactcagaaaaatgttgatggtggtatgcaaattactgaggtttggacaacactgggatagaggaaagatcagtggacttagggacacctgtcctgtgttccagtctcacccctgccatgacgtagtagggtgggcctgtataccactcttatctaaagcctcttaggaccacgcacagtggctaacacctgtaatcacataatcacactggaggctgagacggaaggattgcttgaacccaggagtttgagaccagcctgggcaacctggggagacctcatctctataaaaaatacagactagctgggtgcgatagtgtgtacttgtggtcttagctacttgggaggctgaggccaagacttctaagactgtttgctaccctaaagttctgtgattctgtgttatgactttggattctttatttagatgacctattgcttatttaatagaattttctccttttcagtgatcaatctaaaataacgtgcgtatttagaattttaaatatgaaattagcatttaaaatcttctaagaaccatagtatcatagtaacagtaagtgaaaaagaaatcacttgtgaacttgaacttgctgttctatcaaactcttatgtccattttgtattctttatgctgccatattatttttatgtggttgtgattatgcttttatagacagagtttctggcagcagtcttcaaatacaaatttgcatttcattctttagattacaattgctcttagtaaatgaaaatttaaatgtgtttcatccatactttgttttggtagctaatattcaagtgaatcttttgaattgatttaaggagaatactatgacattaatccttgagcctcatctagccaatgatatggtataataaatgtcttagtgctttacttgtatgtatgagtctttgatacaatttggatatttgatattaggagtcttgtccataagagaagaaaaacagttattacgttctgttttcctagtcatactacttctatccactattgaccatttgtttcgtgtttataatttcatctacaattttaatcttcattggaattgttagatctgactatagaacataatgttatatttccttagtttgcttttacatatagaatttgatagaaatacaaagatttgcccaagctaacaaagaagcttccttcacaatagagctactgttttattttgtgatccttttctacctataacatcttacttgcataagctcctggttgatctctcttgaaattcataggcttttgaaaagttggctgcaaatcttgtggtattactcccaaatcatttcacaagtttttcttaccttctctttaatttagacatttacatttactaacagttgaaatgaatttgtgctttctgtttttaagttttgatttttaaaaatcaatttgatgtagaaatgtacatatttatataaaattaggctcccaaccatatgtacatcaagttttatttatttatttatttgtattttttgagacagagtctcgctctgtcacccaggctggagtgcagtggcacaatctcggctcactgcaacctccacctcacaggttcaagcaattctcctgcctcagcctcttgagtagctgggactacagacacgcactaccacgcccggctaattttttgtgtttttagtagagatggggtttcactgtgttagccaggatggtctcgatctcctgacctcatgatccaaccacctcagcctcccaaagtgctgggattacaggcgtgaaccaccgcacccggcatgtacatgaagttttaaagtccttaggacttaactttcagattagggtaaaaatagttcctcttatcatcatcatatcttgaaaattcagaaaaacatactcagttattaactgttacagcgtatgtcaatcctatctctttttttggtgtttctctggattttcagtttcttgccttctgatacttttgtgataaaataagtttgaaggtcatttcaaagaggaaagtaacttttagttgatcttctgccttcccctttataaaactgttttaaataaaaattgaagaggttattgggtaaatgccaactaggtaacttttaaaacaagatattctatactaactttatacttcctttaagaactaatagcttagtatttgatttagatcataagtttattttttgtttttatttttttgagacggagtctcactctgtcacccaggctggagtgcagtggtgcgatcttggctcaccgtacactccacctcccgggttcaagcaattctcctgcctcagcctcccgaatagctgggactacaggcatgtaccaccagccagctaattttttgtacttttagtagagacggggtttcactgtgttagccaggatggtctccatctcctgaccttgtgatccgcctgcctcagcctcccagagtgtcgggattacaggcgtgagccactgtgtctggcccataagtttattttttatttaattttttatcatggaaatttttcttttcttttcttttctttttttgtttttttgtttttgtttttgagacaaggtcccactgtgttacccaggctggcacgatcatacctcactgcgtcattgaactcctgggctcaggtaattctctcacctcagcctcctgagtagctgggactacaggtgcataccaccatacccggctaattttcatatttttgtagagccaaggtctcactgtgtggcccaggctggtcttgatcttctgagctcaagtgatctacatctaccctccttggcctcccaaagtgctgggattacaggcatgagccactgtgcccggccttgtcatggaaattttcaagagtaaataaatccggatactctctgcagtgcattgacatgtctcttaagttacttttaatttatattttctttccatcttactttttttctataaactccatgtcatatatttggaagaaactgagttattctaaacttggttgactgcatacttaaggcatcatttaacatatttctctaatggcttggttagatttaggtctgattttcttgttgaatcacatcaggatgcagtagggttgtctcactttcagtaacattggttagcctgggtatatagacctaacaaccatgaccacgtaagtctaccagaaagctcatgcaggagtgcttatagcagctttattcataattgccaaatattggaaatagccaaatgttcatcagcagtataatgggtaaattaactgatagatgcaacagtgttcatgtttctcacagaagtagtgttgagtgaagagagttaacacagtaaagagcatactgaatgatttcaaatataagaagttcaaaatgagcaaaattaatgtctcatttaaaaataagatagaccaatgaaataataccacctattaaaaaagtcttttccccgccaaatgagatgtctccattattacatactcaatttccataggtatgtgtatttctatatcttgttccatttgttgattcacatgcctgtatcacattgttttaattatagaagttttataagatgttttaatctccgacagggtgcattcttctagctatttttgcttgtctgttctttcaaattaattttataatcaacttttcttgcctcaggaaaaaataaaaccttaaaggtatttcattaggattgcattaaattaatagattatcttagggagatccagtacctttatgatgctgaagctttctttccaagaacatggtttctcttttgtcttgttcactttcaggaatgttttgtagttttccttatatagattttgtactgtttctgttgttgaatttaagcctattttgatttttgctgttgtaaatgaggtcttcatctctatttatactttctttttctatttttactttgctgcccccgccccccttatttcttcttactgttacgttgtatgtatgaagactggtgtctttatgtatgctaattttatgtcctattttactaaattttcttgttgcttggaatagttttttcatggattcttttgaatttttcagttaagtatattatttgcaaataatagatatagcaatagcttcgcttctaccctactcccaccccagttattatgcctctaattgctttctcttgtctaattgatcattgcctacataatgttatatagtagtggagtccttgtttttctaatctttagtgttaaaacctttagtgtttccccattaaaatcttgcttaaaaaacaaataacaacaacaaaaaacccagcaagatagtcctggcacagtggcttagtgtctgtaatcccagcactttgggaggtcaaggcagaagaattgcttgagcccaagagttcaaggttacatagaacaatgattgcaccaatgcacttaagcctgggtgacagagcaaaactctatctcaaaaaaaaaaaaaagaaaaaagctatatatatgagaattataatttataatataccataatattcatctattgcaaaccgtacaattcagtgattttttttttttttttttttttttttttttttttttgtgatagagtctcactctttcacccagactggagtgcagtggtgcagtcttggctcactgcaacctctgcctcccgggttcaagcaattctcctgcctcagcctccccagtagctgggattacaggcatctgccaccatgcctggctaatttttgtatttttagtagagatggggtttcaccatcttggccaggctggtcttgaactcctgacctcatgatccacccttccttggccccccaaagtgctggaattacaggcgtgagccactgtgcccgcagtgattttttttagatttttttttttttgaaatttatagggttgtgcagctatcatcacaatccaattgtagaacattttcattattccaacaagttctcgtgtccttttacagtgacttttatgttgagtggtttatgagagtatatttatatgtgtatttttgtgtgtatgtacatataaatatgtcttatgcctatgtgaccatatttattatgtaaggacgtatctgttaatttatttcattgcctgtttttaatacaaatgaataatgtttgaaagttttctttttgacatgcatggttaaatcagcaggttcaagttgtattctgcgggcaaagtgaaacagaaaaatcttgttataacaaaatatggcaacattgtagtaaaatttattttctgtgagtaaaggaagatggcgtttcatattctgaattgtttgttccatgttgtttgttaaagaggatggcattccctgtggatatgctggaaaattgcagccatgaggaattggaaaattctgctgaagattacatgtcagatttaaggtgtggggaccctgaaaatccagagtgtttttctcttctcaatattacggtaaggtgttctgcagtgattgtcatcaatcttttcagttcagtttatacatgaaataaatatccttttttaaaaaaatcattttaagtgttaatcattaatttttgaaatctttacagaaatctattcagtaaaatggataaatattggttgatcagtttttaaaaagagaaactccacaggttattgctatttgactttatggctttaaaattatatgtgagaataccaccagttttgctaagactgtttactatatttgagctgcttcagatttactttagatttggaatttgtgagtttagaaaattttttaattaaaaaatcagcaaaacactaaattacatattttttgtgccatgaatcttttcttcctttttctaaaaaagtaaaatcaaattttctagtcagtaaattataatattttgtgatagatcattagacttggaaccattagggtttcactgtgaactgtggtggacaaattccttaacctctctaggccttagatttttcttctggaggtgacttaaagaattttttaaagtcttccccagcaccaatatttttataattctctgaattgtaatgttatctctaaatagggaataagtgttggattaaatgaaggcaaaaaaatgttaaagcatattagtagcatgtatcttcccagaaaaattaatttacttgactgcttttttttttgttttttttttgagatggagtctcggtctgtcgcccaggttggagtgcattggcacgatcttggctcactgcaacctctgcctcctgggttcacgccattctcctgccttagcctcccgagtagctaggactacaggcgcccaccaccatgcccggctaatttttgatatttttagtaaagatggggtttcactgtgttagccaggatggtctcgatctcctgaccttgtgatccgcccgccttggcctccccagagtgctgggattacaggtgtgagccactgtgcccggcctgctttttttttttttttttaactagataatggaatatcttcctcaagtaggctaaataacagatgataaattatagttgttttttaaatgactttatgggccatattatagctttggtttttattcagatgtgtggctagatacataataatatttatgaaacaacttttcatattttccctaagacaataaaattattccaaaagggaagtctatctgatttactctttttttagagactagaaataatgtctcctataaaataaattaaaattaacgtaggaaatatttactactttgataaaagattgatttttttaatgtattttcttaacagactgttcactaatctttattaatttgtcatttcagattcctattagcctgtcaaatgtaggctttgtacctctttatggtggagatcagacccagaaaattcttgctctctttgcacctgaagattcactgacaggtctctttttgcttaatttttataaattaaggaatttttctccaaactgttagaaatttatttaaaaggtagctacatgaaggaatttggttttttttttaaagtgtttcaaattgtaattttattaaaatgtaattcttaattgcttatagctacatgtttgatggatgaatgtctgctatcacactgctataaagaacttcttgagactgggtaatttataatagaaagagatttaattgactctcatagccaggcacggtggctcatgcctgtaatcctagcactttgggaggtcgaggtgggtggatcacctgaggtcagaagtttgagaccagcctgaccaacatggtgaaaccctgtctctactaaaaatacaaaattagctgggcgtggtggcacatgcctgtaatcccagctactttggaggttgaggcaggagaatcgcttgaacccaggaggtggaggttgtagtcagctgagatcacaccattgcactctagcctggacaataagagtgaaactccatctcaaaaaaaaaaaaaaaaaaattaaaaattgactcacagttccgcatggctggggaggccaccaggaaacttgcaatcatggcagaaggggaagcaggcacgtcttacatggttgcaggcaagagagagtgtgtgcgcacgtgtgtgaaggaggaacagtcaaacattatgaaaccatcagatcttgtgataatgggacccccccaccctgacccatgatcgaatcacctctcaccaggtccctccctctacatgtaggaattgtggggattacagttcaagatgagatttgggtggggatgtagccaaaccatatcagtgaaataaaaatggtataaatgaggctacaaagtacaatattactatttggtaaggtttatatagatactcttaaatataaagtatatggatactttatagtacaatatggccttattaagtctaaaagtgtactttaaaactcaagtgttaatgattatttattctattttagctgtggcactttaccttgctgatcagtggtgggctattgatgatattgtgaaaacatctgttccttcaagagaggggcttaagcaggtaacaagatcctctaattttgagtgtttcttttgaggccatttcacagtgtttcctgtaaacagtgatagtttttgagctcttccccatttaaaaataatcaggttatattaaaccctagaatttcattcttacgatgaagccagcattcgggttgggcttcctccatttttatgtgattctataagtatctgagattgggtgaggaagaatgaatacctatgggttagttgagctttggctacctttatccaagttagcttctgattttcttatttgatagaggaaaagctagttccctttgtgtgattgtttagcttctgtctctaggagagactgaccaggaaacttgtttattagtagggcctcttcaggtggtctatatagtgttcctaacagtggaatgaccaggttcaggagagagcaagcttccaacctcggcagggttatagtagaaggcagccagctgaagaacgttgcaggaaggaagctggttttcatgctagagatgaaagggtttaagagacatctctggtgctctagttattggaggataaataggacaggatatggaaaatctatagaaaccaagatgtaacatatttgaggaggcagggcataataaaaaaagatgaaatctttggtggctggaagagtgagatttataataatattggagaaataggaaactgacttggtagaagtgcattagactttgcttacctaaaaagaatactgactttttggagaagcagtactattcattaattaagtatagagtgtcttgttaatcctaaaagaaagagagccttaatgaggatcatgaatttttttttttttttttttttttgggatggagtttcgctcttgtcgcctaggctggagtggggtgctatctctgctcaccacaacctcagcttcctgggttcaagcgattctcctgcctctgtctcccgagtagctgggattacagacatacgccaccatgcccggctaattttgtatttttagtagcgacgatgtttctccatgttggtcaggctggtctcgaactcccgacttcaagtgatccacccgcctcagcctcccaaagtgctaggattacagacataagccaccacgcccagccaacaggagaatgaatttaacagaaatatatatgtgtcttgatattcttcctttagaacacttctaggataggccaactctgtaaaaacttgtcagattcgcagggttccagctactgttcattttttttgtgggcagttgaaccagtcagaagaaacaaggaaagcatatcaagaaattttgatcctgttactccaattcacagaaaaacaaaacttgatgcttgcttaaaggggcagtggcagcaggaaaaaaagaaactgaagaaacttgcgggttactagggtgtttttatttcttccctttgagttgggaactttgaaagagatgggaggataagagaataatgcacttagtattattaagtattagtaacttttggatattgcattaattcttcagtgtgccttaagattcccaaagtggtaggcccatctgctgaaggctcggagaatgtgtgtacctggttatctgccagtctgatatgaaactttgaacagaaactgaaggggaggagggaattatatccctgcataaagctgtaaaattggaggagtagatagcaataaaggagtataatatgttctcaggaacagttctgatagtgaaaagaagtatgtatgtcaagaaaataagcattctgatgtgttttaacatgactgaggtttggcatattatagatatgaaggctaaaggatggagaaggagaagggaaaatcttaatatgatggtatattgtagcttttgctgttcaagtggagaaactatgaaacctccagatatggattgggaaaagaggaggagtcaaaaccaaaaataagactacaactatgtggactctttcagccttagttaccttagggacaacattccctctctttttttttttttttgacacaggcttactgacgcccaggctggagtgcagtggcatgatctcggctcactgcaacctctgcctcccgggttcaagcaattctcctgccttagcctcccgagtagctgggactacaggtgtgtgccaccttgcccagctaatttttgtatttttagtagagatgcggtttcgccatgttggccaggctggtttcgaactcttgaccacaagtgatccacctgccttggcctcccacagtgctgggattacaggtgtgagccaccactcctggcctacgttccctcttaaatagagaaatcagtgaagggggactgctattccagtcaaatcctggccagtaaggaaaaattggttggtaaagttacagaagggtgtaaccctttttgtacttaacaaacacttaacttggagcaagttgactttatttttataaacctctctgtacctggaaactgatgctcaattatatggacgggaggtcctcagtagtatgctgcaagactttgtccattgtgtccttcattttgtcagtgacttagaggcatgcttatcaattctgcatgtcactgtgctgaatggaggagctaatctgtgaagggcagaattaaaaaacaaagagaaagatctaacataataaaattaaatagggagaaatgtaatacctataggttcaaaaaattaactgtacaccatgaacaccaaactgaaacaacagtacgtatgaaaaagtattgggctttaattaattagcagtaaaatccagataagcaaaaaagctaataaaaactttgtttatatagaaaagccccattgtctcagcagcaccttcaaaatatcttcatgaaatccacatcccgaacatgaagagagatgttatggatctggagcaatttcaagagagagcactgaaatggcaagagtaccccaaattgtgttagattagccttttccttcatttataaccatgtttaacattgctgtgaaatttaggggaacatcatggctctatcttcaaatatttataggctatgtggctgcagaatatcaaaatatagtctttgagaaatagatttcagctctgaataaggaagaattgttgttggtcagaactgtgggttcaaggaaggaatgggttgtcttggaagctattgctagtcggctgctatttcctatgtttgttatgtgagatcccctgccagggatatttttgagagtagtatatgtatatggtcaatcttttctctatccactgaactaattagagcctgaacttgttttaagagacctgggggaatataggcttatgtacagatttttttttttttttttttttttttgagacacagtctcactctgtcgcccaggctggagtgcggtggtgcagtcacagctcactgcaacctcaacctcttgcgctcaagtgatcttccccctttagcgtcctgaatagctgggactacaggtgtgctcagccatacctggctaatgtttgtattttttgtagagacgggtgggttttgccatgttgcccaggctggtctcaaactgagctcaagcgatccacccacctcagcttcccaaagtgctgggattacaggcatgagtccccgtactggcctgtgtatcaggaacacctcactatttgatatcagaaagttctgagtgttggtgcggtccctgtgaccatgtagccctgtgtgtaggaagtgagactctgtttctgttctattactgccctaagtatgtttttattagacttctttggtatccccgtctttgttgacagcaaagatagggctattaaatgaacattttaccaggaaaagatgagacacatttctttcccaagagtgtaattatggcttccctcaccaaatgatgtaattgttcttaaagtgttcaggggataacactaagctgcctttttttttttttttttaaatgtggagactgaaaagcagttgaagtagtttactatagtgagggctgtgattagggttggtaagaccctggatctgggcagctggaagcagaaagaagatggtgagtgctgaaagacatgctcgggattggtacattggggacctgttttttgcccgatttagaattttgttgaaaggcagtattctatgcataatatgtgtgtgtggaaatggattgtaatctatgtgaatgattagtctcatctctgtggtaataaaatgttttgcaaatttttttgaatgcatttgaagtgctttgaattccagtatgaggtatgggagcagggagcaaagtaaatagcatcttgtgattgatgcatattataactgctgtgcctggtgtttgactctctttgtaggtgagcactcttggggagagagtggttctgtatgttctgaatcgaattatttatagaaaacaggaaatggagagaaatgagatcccattcctgtgtcatagcagtactgattatgctaagattctgtggaagaaaggagaggccattgggttttattcagttaagcctacaggtgagtctttaaaagttatttaaactgtgtattatggaaatctctattttagacccctccaactgtatcaatatctctgttaaattaatctctagcatgcaaattgaggtgattttaattagtatttcttgggagtactttgattctaccatcctatgacagtgaggattgttgggaaagtgttttgaaaaaacaaaataaaaataaacatttgatcccgaagaagatttctccatatatatggagacacagttgtacgttgaacctcatatttgtctatcttctagccctcacatttccaaaagttgttgtttactttgattcctgttgctgttactgttacaggttccttctaaaaccccagtctacctgtggcccaaatgcatagcctgtttatgcatagcacacctcattcagcctgacatatgaaagagcaacttggctaattaccaagaaaaacaaaatgctttaatatatttagtaaatacaaacagctttgaaattgttagtctaaagtttgggtttctgatcgtaagagccagctataccctatccttaaaaaatagtgcaacctcatacctgctttacctgtactcccattcattcagctccctagagcagctggagccaggaagctctaacctacttactctgtgtacacatacaatccacaccttgtgaccatcaaagaacaaagtctgccttgttttgtaccttgaccaaaagacctttcacagagaatacacttagtttctttttatttccatttcagattttccaaacttagttcttctggtcacatccagtctaaagatcctaccaaattcactgctgatctaatgaacagttgtgactgataccttgatcccataattagtacacatttgtgatgagaattagtgcgtatagtccataaaaggaaggtcattttttcccaagaataaaaaactgatgtgcagtttaaaatggtttttctttaggtaaatactttgggtgccctttattgtctctgttcttgtataaatttgaaatagaaccagtaacttttgtaacttcagaaaaatactgattatacatgaggagaaagagttttcaatggaaatttagtgtgcattgcagagaagacatcactttgttgtttttaaatgttttaatgtttgcagttggggtgtgaattaattgctttgtgatttattttatataaggcaattcctgtgggaattggaggctttttgtttctaatactggctccaggggagtttcctacctgatagacatttggagcataactagtttatacttttgtattgagggcttctttctatgaaagacacacaaaggcacagccttcctatttagtgtttctgatcagtatttaactgcaggagtgtgctcttcttattatgcatgttgaggctccttctctggcacctagcctctatttctgcttgttctggtagttaactattttatagcattgagtttccaggtgctactgtatctgccacttttagtcccttccatatatctctaattgtcttacatctttactattttagttctttccccgttgtaccagataacaatggagttaagtgggcttatactagcctttgaatcagtagccatttaattcaggctggaagtgttttttctacaaaggaaacctaaacataatttaaatattttagagaaattgtccagaacaaatactaaacaccttgtgatggaagtatttctgatatgtgtgtgtatatatatataaataaatgttatatttatatatataaagtatataaacatacaacgtatgtatttatataaacatatttcatatatatactgatatgtatgtaatatttttttctacactagtagcaaaaagataaaatctttattaagaagatttgtagttgagtgaaagtcttgtgaaatcatttattatttatgatttttaaaatagcaaataagtttatggggctattaggacatagaatagccttgatagaaaaaggagactttgtttatgaggtcaaattctcttacagtacaatgaaattcaagaaactatgtaaattcttctttgcctgaaatagatcactgtgagagacttacagtttgtttgttttttgggttaggtagatagttttcttataaagatatttgtgtttttttggttgtttttttctactgttattttaatgtagtgagctcatttctttaaggtgtgtttcattttttctcattatttatatgatgttttatattttcaaacaattctgcaaaagcaccaaatgtttcaaacctagtctttcaaatgaagtaaaaaaaatttttaaattagtgtttattttgcagttgaaggaaagcttcagaaaatagttgcttgtggttcctgaatttatcttaatttattggtaaaataagtttttacttccttgaccaacagttgtttacttaacgtaattgattctttcatcaaatatttttgaaaaagaacattgagtgagattgaaggtattgttactgatttcaagtcatggttaattcttgagatctgtccgtgtctcataatgtttttagttatgatggctggttcaaatctgtgcttaagctctagggaggaagcagaacaaagcaaaatgatttataacttgacgtataccacactcctcacaagtcgaggacagtgaaaggattcataagaaatttgaaaatacacagattgaatatctctaatctgaaaatttgaaatccaaaatgctccaaaatttgaaacattctgagcgccaacaagaccctcaaaggaaatgcttgttggggcatttcagattttggatgtttggattagggttgcccaacaagaaaggaaaatgcaaatattccaacattccccccaaaatctgaaatccagtcacttctggttctcagcattttgggtaagggttattcaatctgtaccttagttactctctattctttttcatttgcatacctcaagactgctgatgagtttgagtttgaagaaattattaatgaaataattgggacagctttttcagacaagtcaatctattctttagaaacttcgctatttagtctactgtacaactcagaaattatcgtaagacaaaatcaagcattagtatcaaagagattttgggttttgttatagtattgctattaacttgtaagttgtgtagcagtctttttttggcttttacttttctcctttaaataagggaattaggcttgaccacagatgatcgttgagacttcttttggctctaaagttttctgaattctgtggttagaagtggggactgtctgtgggcagaaatccttggtctcaggtctggctttcaaaagaaaagttgaatttaagagaaaggttgttaagttgaaagactatgatagatagtaaaggaagatttatttcttggagtcttgagaagagaagattcaataagagtaaatgcaggtagtgttttgtcatcaaagccccagtgtatgaccctgagacattatgctatataggaataaagattatttctcaataggcgaaattatgaaaatgcaaaactcttcagctactcatttatatatcaatattttgggtcaaatgcttttatgatttattcttagtaggttaattttcagacattatagtttcaagtttgggcattatcttgttattccttaaatacagactgtaaaaattatgtattccctgtttaaaaaaaaatagatatgtgatgtatagtcatggtgacaggtacatgatctatagtgaactgggatatatgcagtttttttgaataacatttctaaggctaggaattatttaatgatagttcctaatagtaaacacccgttgcattgtatttctcataatctcctgtgtctattggcaccttccccacaatccactgggatagttagtatttttttctgtagttgtcattattgcttagtgggattagagcacatcttcacaggatccatagttaacagtccctctacttatcaagtttggttttcattatccttgtcagttttttaggcttgtagcaacagatcatgactagtaataaaaggtatttattgagcacatcatgttcgacattgaagagttatagtttacttctttcttttcctatattataggtagttttatagtaatctgtaatcttaagtcaagttgcaagttccccatcatcaagggcttctctttcctctctttttatgttgttgtgtgagggggattcttatctaggtaaatggaattatttaatttttctaatattgtgctgtttactttttcctaatgaccattagattaacaaagttgatacagtaattacttttggtagaacattcaaaatgctaccaccttagggaataaatcattaagtgatctgtattttattccccatatttctttttttttgagatggagtctcactctgtcaccaggctggctggagtacagtggcacgacctcggctaacttcaacctctgcctcctgggttcaagcgattctcttgcctcagccttctgagtagctggggttacaggcacgtgccattacgcccggctaattttgtatttttcatagagatggggtttcaccatgttggtcaagctggtctcgatctcctgacctcagatgatccacctgtcttgggctcccaaagtgctgggattataggcgtgagtcaccacgcctgtcgggcttcttgtaaagggtcgtttaattatttttttgagctagggtcttgctctgttgcccaggctggagtgcagttgcgcaatcatggctcactacaacctcaacctcctaggctcaattgatccacctgcctcagcctctcaagtattttagttttctatttaaggaaggaaatcttgctattacttttctttgtacctgtgtttatataacttaattcataaaacacgggcttagcaacaaatagagattagatctgtgtcataggaaaatgacaaattattgcctatcttggacctgcgtggtgacttgcattcacaagaaaccatagatgctaaatccacaaatacctttatcttatggcatggcactaaagacttaaaggaaagcacttgatgaaagataatagaaaatgttcatggttgcaaaatcagatattttatagtcgttccgtttgagtacttcatgtgtaacaaaaacttacctgcaaaaatagtttataaaaggatgaaaactgcagagaaagcctttttatgacacagaagggagcgtaaaagaagaaaaaattgttctatactgagttttacaataattgctatactaagttatgtaatatttttagtttattcaggacaccgttcaaaattcattgacctcaggcgtagaactttgtattcaaagtctgtataagtcatacatgtactcttgcaaacttttctcagaattttgtagtgaaaatttggatggcatgttgaggagtttatattgctagtggtaggcagggtgtggctatagtgctaatgctttggttaaagagggtgggttgaacacgtgcctcagcctctactctctcttgcaaacaccaccagaatgacaccaaagacatttttaaacagcataaatcccacatgacgaagtgagtaagaggagagtgtaacagcaacaaaactttataatctgggaaaagggtagattatgtagtaactgaatcctaagatgccattgcccaaggcaggaagcaccacatttatattttagaacctttaaaaagttcagtcattataacactagctacttctgggaggtggagccttagaaaaggattggctgaaagttccttccctaatgcagcacagctggacagttaccccagccttgctctgggaaaagacctgctcctgggggcacatggagactttcaggtatggtggcaacatttgtgttagggaataaattatcttccttctcccattttacaaaatgaaggtatatctttcatctaacctttatcttgctaatctggagttgtaaaaaggtctggaagtcccactttaaaaaaagaaaaaagaaggcagggagaggcctctaaatagttttgtagtagtgtaaaagtgactggatataattagatgatattcttttgtaagtcaggtggtttctatttgttttcaacaaaaatgaaagaggatttgagttgtgtttaataatgccagattattaaagataattttttataatagatcactgtgtgatatgtggcacataactaaggacacttacattgctataacgaagggttttctggttccttcttatttgaacaaggttcttaagcacttatatctataaaaataaaaaataggaataggattaatgctgaactttgtctcattctggtagtaagtaattcatgaactcataaactaattaaaaaatgatacactccaggccaggcatggtggctcccttctgtaattccagcactttgggaggccaaggtgggcagatcacccgaggtcaggagttcaagatgagcctagacgacatggtgaaactccgtctgtacaaaaaaaaatacaaaaattagccgggcatgatggcgggttcctgtaattccagctactcaggaggctgaggtgggagaatcgctttaacccgggaggtggaggttgcagtgaaccgagattgcaccattgcactccagcctgggtgacagacactccatctcaaaaaaaaaaaaaaagataagctccatctatttcattaacagttgtatttaaaataatatttggttttattttgcttagtaattagttttcccgatatatgtgttttgatttgttgtatactaatataataattataataattccaaatttcttttggatcaatacttagaacattaggatcacaagatatttttagaatttatatacaaatatattcttgtagagaaaaatgattggataatcagtaaacttccatgcataaaaatattacatcaggataacattctgtggaataaatatcatagaaatattagtgcaaggagaagaaggagcagtgtaaaactgttaaggaatagtttgttcaatggatggtaacagttaccagattgattatagtttctagagtccatttgatacatataaaagaagggtgtaatagttttgtttttctttaagtcaatgttatttattaactgcaaagggaaaaatggtaaatttacacagagaaacctggcaggtaccatgttaaccaacagattatggttaacatcactagtaataagacatatcaacatcatgtatcccatgatatatgatgtactgagaagggcacagtatcattctgtagcatttttgcccaaaatttatgatctcagttcattcatgagaaaccattagacaaagccaaattaggagagttattctataaagtaactgacaatcagccatagtgtcaaggttatgagtgacaaggggagatggaggaattatcgaagaccagagtttagggatatattaaactaaatgcaggaaggaattctggattggattctgaaacagaaaagaacattagtggaataatgtgtgaaatttgaataaagtctgtagtttagctaacagtattatagcaatgttaatttcctggttttgataatagtattttggctatataggatgttaacattagggtgaagggtatatgggagctctttgtaatgtttttgtgacttttctataagtctacaattgtttttaaaatagttttttaaaagtcaacaatatgtcagaaataacatcttctgtaattattgattgaaacttagatgaaaatttttagatatcacaaggatgtgtgaatatatggtatttcaaaattattttatggctacatgagcaaaaacgtctcctttgaggagtttgactaggccaaaagaaaaaagaaactaaaaataccaatataaatggttcccctaggaaaggctccagccatatcatcctgctgtgaggtccattgccagcaagccccaccatacacacagagcttctaattagctttttaatatctcattcttaattatgaacagatagtcataggtaaggaaggccactgatgtgaaaaatggtgattaaagcaaaagagagtaaaagagatttggaggagaagacaatgcaaaaaatgtggcccttaaaatttttggaaaagttagtcattgcatttatgaaataagaacaagaatgttcacagagctcttagaaactaaaacaaatccaatagagttggaggaggttgatcagaaaggagtgcagaaacaacaaaaaacaaacctaaatgatggtaaataggaagagatgataaaattagagggattatttaaataatacatgtttcaggaggagagaacaaattggaggagaaaaaatcaccaataaaataattcactaacatttctcagaactgtagaacacacatttccagattaaaagggcccattgagcatccatcacaatgaattaagatacactcataccaagattattgtgaaatttcagagcatctggaatagagaaaagattttgaaagcctccataaagtgagagaatgatttagacaaaagatcaagaatcaaaacgttactagagttctcaacagcaacatgaatactagaagtggaataatgcctttaagataccaagggtaaagtgatttccagtgtgttctgtgccccgtcaaattaataaagagtgagagtgaaagaaggaaatttctagactgtcagtcttaaaacaatttaccttttatataccccttttctggaagtgagtagagtttgtgctctcctaagataaagaaaatcaagaaggaaagatgggattaggaaactaagagagaaaagaaaggagatccaacatcacagctatgtcagttgtggagctgctctttgttaaaaccactagctttatgtggctgttgaagttaaattttaaaattcagtttctcagtcatgctggccacattttaagagctcaatggccacatgtgactagtggctactgcattggacagagtagatacagaacttttccatcattgcagaatgatcttttggacatttctttttctaaagattgactgatctagattggagcagatcacaaagctctgggacgttgatttaagaagatagagttcatagaatacctgatgtatttgaatttattgggataagatttacatagttactggagactttggaggatgagagagatagtaataaatattattaagggaaatcaaaaagtgtaagaataaagataaaaataaacattcatggtacactatatggctcagttgtcaaaagcatttatatagtcataatgtaaatactgaaaattgatctaacaaatcacaaattactatttaggggtgttggggttttttgtatgggaagtgtgtttatgttggagttgagattggggtgtgtgaatgtatttaagagctaaattctcaccttccaagttctagctatctatgcctaaaatggaaaaatgaagaaatagaaatcaagaggtatagtaagttacttagagaagtagaagtaaataccgaaaatatcagctaaatgacttcaaaatggttgcttttggggtgtagaaagtgtgtttgtgtgtgtgtatgtgtgtgtgtgtgtgtgtgtatgtgtgtgtatcaggaaagtggtcacagagctgctttttttttttcttaagtcttatatgactattgtattctaaacaatgttatggatgactttgattaaaaacaagaagtatacatttaaaaaaatgaggccatgtccaaagtgtaatcactatctaccacaaaactagctgaactttataaatccttctcagcctggaatgataaggactatctgttaaagggctgtgctaattagaagattaatgaaaaagtctcatacagttactaaaataatacaaaacaaatcactggttaattcagtggaagttttgtgacttttggcctatatcaagaagtatataaagatgcaaatttgtgtaaatagcataccgtattttagtgtagataagctcagagaacacaattgaggtcactatcattagtcgctatttttgaagtactcattgttatttggcttcaactgtcaattgccttgatccaatttgaagacttaatattttggggaagaacaatctagtcaacaactactataagtcagtttagcccactactgaagggatttgtgaccaataccaggaagtgtatttctggtttttgtaatcttcatttgaggtgatttgtaatggaagcattttttcttgtccacatttactcgtcagctttccttgtggcttccagaccttttactaggggctatatccatgatcttccctacttttttggacagattactcacttcctgttcactaaaattcagatttctgggccttttaaggttattttaaggaataacaaacattgtgatgtaaaattataaggattgatagtatagctaaaagtgaaacccagctgaattttttgttgggagagtgtgattatattttaaggacttgagtctgtctaggtgtgattcttgtctttgggaaatgtgcaaaggcatgtgagagtcccgtactactctgtggctacctgaaatgtatcattgggaaacgagatggctgctttgttgaggtgaagttctagctatctgaaaaaccacttgcttgccaataagggttctgtttattcgagagatagagttgactttagtggaaacacaaagatgatttgtcatgggttcagttctcaaagcaccaaaaatctagtggatgagacagtaaaacccacaacatcatagtcgataagctgtattattagataatcaaaattcagttttgtaagtaatacatttgaggtatcaacaatggcagtctttgaaagcaagtagttaactttgcctggagggaggtgtgactgggaaagtgatatttaaaagtagttttgaagggtaagtagtttgtcagtaagagaagggggaagggaaagaacattcttggtaaacatgaatggaatataaatatatgcagaaggcagagagtcatgaaagtttagggcatatttggaactacatcctgaataaggtggtgggactaacaagtaggagaagtgaagatggaggtcccattgcaaaggatcttaattgtcctacaaagaagtgtggcattttattggccaggaagctatcaaataattttatgtagaagtaacatgattaaatattttagggacatactgtttggagcacttggaaaattgtattttaaagtcagggaagtcaattaaaagagctgttttagtagttcaggtgaatgaaggaccagaactaggaaagcaccagtaggagtggagaagggaacatctgagggagagtttcaggtggacagagtgtggtaactccatagtgtgtaggcggggagtggaggaactagtgatgaatctgaatggctttggcttgggtgcttaggtattggtgggaggctgttaattaagattgggaatagaagaagaggagtagtttgataatactttagttcaattttgacatgggcatatgtgtccctaaggcatatgtaagtagacataacatagaaatgtaagttggagcacatggaagaggtatggatatttatgtgggccccagaatacttaaagtaattttacagcgtggatgagatcagtcaaaactgttgtataaagtgagtgtatttgtgaatattggtatgaggaaatgacactgaaaacagcctaaagtaaccaaacattactggagggagtattctggcaaaaggtagtgtctcctgagatgtgaccactgatgacctgagagttaacaaggaaatgttgatctgctgagagataagaggaaagttagctgaggctgctagctgtccataaaatatttgtggttcattttctatattctagtcattggccagagctgcccagtcagggattctattttccagtcactgttacaactacatggggctgtgtgactagttctttacaaaataatgaaaaagatgatgcctgtgactttgcgtcaaagtggttaagatgcattccttttcctcatctatacagaggactttgaagatgtaagggatgaggaagccacaggataaaaggaacttggtggccctggtggaccacacttcccagtatttacatccttgtgtagcctgtttgaatctgggctggccctataacttgctttaaccaggagaatgcataacactgtgctcagccttaagaaggctggcaggttccactttggcactcttagaagctagtcaccatgtaagaaatacaacgacctggagactactctgaggtgaagagaccccagcagctccattgaagagaactgaggctctggctgacaagaccagctgtttcttccacctgcagccactacagactgtcccactgtaggagtgaggccattggatcttctgccatcccagtgccctagctgatgccctatgagagttgtgataaataggaaataaattttagttctaagccaatatgttttgggctggtttttaggcagcagtaggtaactgaaacagttccttcatgattgtgaggaggaaaccatccacttcccaggaacgtgtaactgttaatttgaacaaaaaaggaacttttattatgttaaacattccaggtttggtttgttacggcagctagcattgccttaactaatttatagagcatgaagactgtaatgagaatacctagtggtatatgacaggttcgctcatctgaggataatctgaatttctgaataatctgaatctgataatctgaatctgaaattcactttatgtatgtcttcaatggagacagtcacacactgatggcttcatgaggtgttaagttttaaggggagagaaggcatattcctgggtggacaaagaatgaatggtgattctatgagaagaagcagctgctcagttgtggcagaatatctgttcttgaattcaatacatagacctgaatggtgtcgctgaaatttattcatttattaaaaagttgatcttaagtgcatatagatagggaaagggaggcgggggaagtgtgagaaagagcaagaggaagaaattgagagatagtcatagatattttataagctctgtcctcttagaacttagattttagaaggagacatagcaatgaatggacaagtagatgatatgctgtcagatgatgtgaagacaaccaaagtaaattaaaagaatagaacgtgtgggacagcaggtactattttaaacggaatagttaggggaagtctctctgaatgaagtgatggaatagtgagatcaggagaagaaattttcaggcaaagagctgaaaatgcagaagccctgaggcagaaacaagtttgggatacttcagaaatagtaagagcagtgtggccagagtatagtgattgatatggattaggagagaggcagggactgtatcctgaaaggttttttaggccaaagaaagaatttgaatttttttctgcaggtgatgggaaactattgaagggttttgggtataggagtaacatctggtttgtcttttaaaaaggcaaatctggctgctctgtgggaaactgggtgcaggggttctgggtgctgcagagatggcagggttgagttcagctagctaagaggctgttgtagaagccctggtgagaggtgacagtagcttagacaagggagatggggtagaggtggtaagaagtgatcatgtttgagattagttatgaagtgattcctgcaggatttctgatggattgtacgtgggctgtgaaggaagagtcaaacatgagttcctagagtgggcgagtaggggcgaggtttactaaaaaattggtaaactaggtagagtaggttttggggctgtctgcaaaatctggttataaatggtttattggagtcacttgtaagttgatattttgtttttacatttttaacaactacctgagatattcatataccatacaattcacccatttaaaatatacaattcaggctgggtgcggtggctaatgcctgtaatcccaacactttgggaggctgaggtgggtggatcacctgaggttaggagtttgaggccagcctggccaacacagtgaaaccccatctctactaaaaatacaaaaaattaactgtgtgtggtgctgcatacctgtaatcccagctactagggaggctgaggcatgagaattgcttgaacccaggaggtggaggttgcattgagccaagacggcccagtgcactccagcctgggcaacagaatgagactctgcctcaaaaaaaaaaaaaaaaaaaaggatacaattcagtttttaaaaatacattcacagaattatgaaaccattaccacagctaattttagataattttcatccctccgctaaagaaactctgttcattagcagtctctccccatttcctcctcactcctaggccccagccctcaacaaccactaatctattttatatgaataatatgtgactttttgtgtctggcgtcttttgtttagcataacatttttaagttttattcatatggtagcatgtatcagcaccttattcctttttatgaccaaatagtattaccttgtatagatacaccagttttgttatcagttgataaataacagtttggggttgtttctgttttttgtcattgttgctattttgaacaatgctgatatgaacaattgtatacaagttgttgtttggacatgtcttcaagtctcctggagtgtgtatgtagttgtggaattgctgggtcatatggtaactccgtttcgccttttgagaaactgccaaactgtcttccatagagactgtaccatgttacattcccaccagcaatgtgtgagggttgcagtttctccacatcttagccaacacttgctatttgtcctgttgattatagttcacctagcagatacgaagtagccgtgccattgtaattttgatttgcattttcctggtggctaagaatgttgagcatctttttgcgtgcttattggccatttgtgtatcttctttgaatagaaatatttcaaataatttgccttttttttttttttctttgagacgagttttgctctgtcacccaggctggagtgcagtggtgcaatctcagctcgctgcaacctctgcctcctgggttcaagtgattctcctgcctcagcctcttgagtagctggggttataggtgtgtgccaccacgcccagctaatttttgtatttttagtggagacgggttttgccatgttggccacgccggtcttgaactcctgaccacaggtgatccgcccaccttggcctcccaaagtgttgaggttacaggcgtgagcctccgcgcctagccatcgtttgtcatttttaattgggttgttttaaaaacatttttcccagccttattgtgatataactgacatacgaaaacctgcccatatttaaagttgaaaattgtgctttgacatatatatatatatatatatagagagagagagagagagagagagagagagagagctgtgaaaccgtcaccacaatcaagataataaacgtatctgtaatcttgtctttgcccttttgtaatctattcctctctcccatttgttcccgaggaaacactttgctgcctattagtgtagatgagtttgctttttctaggattttatataaataaggacatacagtatatactctttttggcagttgggtggggggggcggggtctgggttctttcagcacattttgagattcatccggttataattcatagaccatagacttaacttttttatggtgtagaattcagtaacttttagtatattcatatatttatacagctatcaccactatctaattcctgaacattttcatcacctcagaaagaatccctgtactaattggcaatcacttcccatttcctttaccccacagtcccttgaaaccactaatctagtttcaggctgggttgtcttttttttctttttgagttgtaagagcccttcatatgtgttagatacaagacccttgtcagatacatactttggaaatgttttctcccattctgtgagttgtcttactttctcgatgatgttctttgaagcccagaagtttttaattttgatgaggtctaatttatctactttttcttttgtcacttgtgcttttggtgttatatctaagaaggctctgcctaacccaaggtgacaaaggcttgcacctatgttttcttttaagaatttgagtagttttagatcttatgtttaggtttagaatccatttgcagttaaaatttgtatatgattctaggaaggtacctgacatcattattttgcatttggatatctagttgtactagcagcattcgttaaatatataattttcctccatagaattgtcttggcaccctgttgaaaatcaattgaccataaatacgaaagtttatttctggaccctcagttctatttcttcgatctgtgtatgtgttcccatgccagtaacatactgtcctgattactctagctttgtagtaagttgaaatttggaagtgtgaatcagtcttgacaagttctttgtcaagattattttggctatttgggctccttattttcctgtgtgtttgggatgaacttgacaattttttgcaaaacaattcgctaggattttgagtctttaggttgtattgggaaatatggacatcttagcatattaagtttttagatccatgaacatgagatgtctttccattttttttaggtgttctctaatttcttttaacaatgtttgtaatctctattgtacaagttttgtatgtctgttgttaaatttattttttttgatgctattatgaatggttttcttaattccattttttggattgttcattgctaatgtgtggaaatacaaatgatttttatatattgatcttgtatcctgcaaccttgctgaacttaatagttttaatagttttgttttttaagtggattccttaggattttctatatgtaagatcatgttacctgcaaatagagactgttttgcatttagcttcctgatcttgaatgccttttctttctttttcttgcctaattattctagctagatcctctagtacaatgtcgaatgcaagtggtgagagtaaatatccttgtctttttcctgatcttaggaggaaatatccagtggttcaccattatcatgttaattgtggtttttttgtagatgccctgtattaggttgaggaagttgagtatttttatcatgaaaggttgggttttgtcaaatgctttttctccagctattgagatgattaagtagattttgttttatttacattcagatgagctctttcattcttgattttgaagtctcatgctttatagaggttaaagatagacattagtagtcatcagcatttggataaatggcagaagtcttggggggtgaataacaatactcagagcacatagaaaaatgtggaattttgaggaatataaacaatctgacatgtgcaatgctaaattaaatgtaatctgagctagtaaatttaatgaaaactttacctaagacagcaggttatagtttttgctttactaggtaaatccacagcttttggtgaatcttaaaagtccctgataatatggaaagtttttctgctctttatttgattgcatttgtatgagtcagaccctggagagcagaagtattaatatgtaaagtgtaggtgaaggaagagaaccagtatgattttctgattttctgaaaggaacatgtacatggcaagtaaaaagtagaagaaatttaaatgttgtgaacacactgcttgttccataaactggccattttaacactagtctgagatactggaatttccctttactagaaggaatgtttctgtgaaaatagaaaaaaaaatcaatttatgagaaactttctgcatttcagtagtattcttttgtaaggagcctgaagcatgtagagtaatgaacaaccatagatcctcagactttgtattgagaactagaactagacagtgctttctcttctcattcatttttgctttgtacttcaaacttgactaccactacttataatgtgtgttaatttcatgatcactgctattgttactctgaaaacccttcaatttcaaggcattaaaaacatagtggttgcgttagcttgttgatgagactgttaccggaaaggggtccaagagagggtttttgggtcttgcacaagaaagaattcagggcaagtccataaagtgaaagcaagtttattaggaaagtaaaggaataaaagaatggctacttcacagagcagcctcaaggactgctggttgcccatttttatgattatttcttgatgatatgctaaagaaggggtggattattcatgcctccccttttcagaccatattgggtaacttcctgatgttgccatggcatttggaaactgtcacggtgctaatgggattgtagcagtgaggacaaccagaggtcactctcattgccatcttggttttggtggattttagccagcttctttactgcaacctgttttatcagcagggtgtttatgacctgcatcttgtgccaacctcctgtctcatcctgtgacttagaatgccttaactgtctgggaatgcaacccagtaggtctcagcctcattttacccagttcctatttaagatggagttgtgctagttcaaacgcctctgacaagattacttgttagatttgtacaagaaatctagacccttagaaatagcctaactaaatgtcagcaattaagatctaagtatattggctgggtgcagtggctcacgctagcactttgggaggctgaggtggggcagatcacctgaggtcaggagttcaagaccagcctagtcaacatggtgaaacccctgtctctactaaaaatataaaaattagccaggtgtggtggcgggcgcctgtaatcccagctacttgggaggctgaggcaggagaattgcttgaactcaggaggtggaagttgcagtgagctgaaatcgtgccattgccctccagcctcggcaacaagagtgaaattccatctcaaaaaaaaaagaaaaaagaaaaaaaataaaaatatctaagtatattaccatatgcattacctattctaaatttaaattagtcggtagtctcggagattgttccagaaagttatgtaagtaatccaattcagtcataaatagttcatattacttggttgaactgaaaaaagttgttatattgatcagctcattaaatgatatgattggtaagacaatttgtgagatgtttgacattttgtttcttgtttgaactacattattggagttatccaaaatcatatgaataatctgagaataaaagattattttatttgaggcaaaaataatagaataatgactgataactatgaattctaaaattaacaggaagtatgacacaccaccacgttccctcaacttgtaaactactttgatatattaaaggagttaatacatctattggaatggtcaaaacccagatatagagcagggttcttaaaagacaaatcagcatagctgtataataaggagagagatatatagaaactacaaattttttgtcctgtttaactttaaacatacaaaatgtatttagcattgtatctacaggaaattttatccatgtctaagacagatgtttccaattcgccccaatttatagtccttaaaaatttggagaactaattcacttctttactatcatcaagtagataaaaatgaaatggtactcgttaggaaaaatgtagagggaaaatatgaatgtttaaaaaaatacagatcagagacatcctcaaagaaaaaaaaaggatattcaggtactaaggttggaatgatagtcttcaaatactcttcaaatttgaaattttaatagttgatgagttttagagttgcatgagtctatagacagtgatggtatatatataatacatatagtgaagtatatattttagaatatggtactgagctatttgtcctatatttgatgatactactagcaaacataaaatacatagctcctttcattatcacattatacattataatgtctaatagtagctgaaaaacactttatattataacatttatatatttaacgttttttgatatagaagaaaactttttttagaaagactgttaactcatgtcactaaatgtatgtatattttttaatgtgagaaattattgggtttctgttcttattactgcaggaagcatatgtgcctcttttcttacccaaagttaccaattgccagttcttgatacaatgtttctaagaaagaaatacagaggtaaagattttgggcttcacatgctggaggactttgttgattcctttacagaagatgcgcttggcttgcggtatccactgtcttctctcatgtatacaggtaaatggactaagttaaaaaataataaacttgtctttgtgtcacttccgacttgtttcttcaaaatacggtaaatgtgtatatatcagtatcacataaatttggaaccttaggctctctagaacttactttggcaaatgtgcccttatgtatttgttttctcggggtttggcagtcttaaaaaactataaatgtaattcatataccatacaattgccgggcacagtggctcacacttgtgatcccagcactttgggaggctgaggcaggcggatcacctgaggtcaggagttcgagaccagcctggccaacatgatgaaactctatctttactaaaaataaacaattaactgggcgtggtggcacgtgcctgtgatcccagctactcgggaggctgaggcaggagaattgcttgaatccgggaggcagaggttgcagtgagccaagatcatgccactgcattccagcctgggtgacagagcaggactccatctaaaaaaaaaaaatcccaaaccaaacaaaacaacatatgccataatatttgccctgttaaaagtgtacaattcagtggtttttagtatattcatagttgttcaatcatagccagcagttccagagcattcttatcactccaaaaagaaaccctgtaccaattcgcagtcaccatccatttccccttcatcctgtagcaaccactaatctgttttctgtctctgtagatttactcattctggacatttttcatataaatggaatcatatagcatgtggctttttgtgtctggcttctttcacttagcatgtttttaaggttcattcttgttgtacgtaaattagtacttcatttctttttatgactgaataatattccattgtatggctgtaccacaacttgttctaaagtgattgctgcattttacattcccataagcaatattatatgagggttacaatttctccacatcttcatcctcaccaacatttgttattatctgtgtattttattacagccctccacatcctcaccaacatttgttatctgtatattttattacaggcatcctagtggatgtgcaggggcatctcatagttttgctttgctttgatgttgaacatcttttcatgtgcttaatggttatttgtatatcttctttggagaaatctgttcagatcctttgaccattttgggggggggttatttgtttatggtagcttttaaaattaacaaaataaatttcagacatacaaaaagaaataaagaagctgggaatggtggcatatgcctgttatctcagttactccaaaggctgaggtgggaggactgcttgagtccaggagtttgagaccagtctgggcaacatagtgagacctcacctcaattaaaaaaaaaaaaaagtttaaaaagtaaggcattggctgggtatggtggctcacgcctgtaattctagcactttaggagcccgaggtgggtggatcgcttgagctcaggaattcgagaccagcctggacaacatggtaaaaccccatcgctacaaaaattacaaaaaaaattagctgggtgtggtggcttgtgcctgtagtcccggttacttgaggggctgaagtgggagaattgcttgagcccaggaggtcaaagctgcagtgagccgagattgcactactgcacttcagcctgggtgacaaattgagagcttacctcaaaaaaataaaaagaaataaaaataagatatcaaatactcatgtactatgtcagcatgtaccatccatgagaaatggcttgttgccaatatggtcgaagccttctatgtacttctacccaattagactcactccccttccctgggatgagtactgtacctaacttggctttatttttctcatacatttcttagacttgtaatacatacgtgtgtattctcaaacaatgtgtcaggttgctttatatatttaaaaactataaatacatactgtatgaattctacagtttgctttctttactcatctttatatttgtgagattcatccatatggattcgtatagttccatttatcgtcaatgccgtattccattttatggacatatcacttggtgatttaaaaccattagtgggtttgtttttgcatttgtgtaaaggtatacaactactcaatgaagtaagatttaattctggatagtaattaacctagaaactcttataaagtataatttactgttgatttcagtctaacagttgacatttatttccactgaaaatatatttttattccaaatcttctgcaccttctttaataccaaaagcaatccagaaaacaggaaccaagtacagaattagatgcccatcttgaatcatattttctctctaaatccatacatgagagtgggatgggcattgtgtgtccttggatagtcctaaaatgcattaccccctaattactgctttactgaatttgaggagagatgcaaagacatccactgcaggcagaatcccttagcacttactctcttctgtgattctaatgataaataaattgaataccaaatgatttacagatgattatcagctaatttctatcttcctataaagccttagcactttggaaggccgaggagggcagatcacttgaggccaagaatgcaagactagcctggccaacatggtgaaattccatctccattaaaaatgtgaaaattagctgggcatggtggcacatgtctgtaatcccagctactcagaaggctgagtcaccagattttgcttgagcctgggaggcagaatttgtggtgagccaaaattgtgccactgcacttcaacctgggtgacagagcgagactctgtctgaaggaaaaaaaaaaaaaaaaaaaaaatccaggcctagtggtgtgcgcctgtagtcccagttactcgagagactgaggcaggaggatcacttgagtacaggagttcaaggctgtagtgagccactgcactccagactcagggaaagagccagatcctgtttcaaaaaaaaaaaaaaaaaaaagggcaaatatctattaagttataatttacatacaataacatgtactttttttttttttttttttttttgagacggagtctcactgtgtcacccaggctctggagtgcagtggcacaaactcggctcactgcaagctctgcctcccgggttcacaccattctcctgcctcagcctcccgagtagctgggactacaggtgcccgccaccacgcctggctaatttttttgtatttttagtagagacagggtttcactgtgttagccaggatggtctcgatctcccgacctcgtgatccacccgcctcggactcccaaagtggtaggattacaggcgtgagccaccgcgcccagcctacatgtaccgtacatgtaccgtacacaaaagtgtacatttttgctgacttctgacaaacatatggacccttgctactgtagacgcaacctagatagataataactttgtttccaaaagttccctttgtgcaccagtcccccggcttccttcccttccaaactctcactccaggcaagcactgatgtgctttctgtcagtaccacttagatttttctagagtttcatgaaaaatggaaatatatggtatctctacttctatgtctggcatcttatttttgaggctcattgatgttgcatgtctcagtacttcattcctttttaaattttttattattttgctgagtattcctccctttgattataccacaatttatttgcctgttgatagacatttgggttttttcctttcttggctattatgaataaagctgcatgaaaatgtctttgtatgatggacgtttgttttcatttctttgtagcgaatacctaagagtgtcattactgggttttatgattgtgtttaactttgagaagttgcaaaactatttgctaagtagttatgtcatttcgcattcccgttagtataaatatgtggaagttctggttgctctgtgtactcaccaacacttggtttttgtcaatctctttaattttaatcattcctagtagtaagtggaaagcactcattatgtggtttcaatttatgttttcctgaagactaaagatttttgagtatctcttcatgtaattactggataatcatctaccctaaaaaagggtagaacaagtaaagtgtttgttcacatcttttgcttatgttgtattgaattgcttgccttcttattgagttatgagttatgttttttttttgagacgtagtctcgctctgtcacccaggctggagtgcagtggcacaatctcggctcactgcaagctctgcctcccatgttcacgccattctcctgtctcagcctcccaagctgtttggactacaggcgcctgccaccacacctggctaattttttgtatttttttagtagagatggggtttcactgtgttagccaggatggtctcgatctcctgacctcgtgatccgcccacctcggcctcccaaagtgctgagattacaggcgtgagccaccacacctggccgagttatgagttctttatgtatcctggatatgagttgttatatgtgtgtattgttaattctttctcatggccttttcattttctttagtccatgtgcattttttgcaagtaagttttgaaattatttagtttacatctcccatcctactgtttattctttatttgtcccatttgttctttctccttttttctttccttttggaagtatttatcagtgttctattttatctcaacagttggtttattagccatgtctttttgttttgttttgtggcctgttgtgttggttttctccagcttcttccttccttttagttttggaaactaaacccagaacatatgagaaatattttcaaatatacagggaaaaaaatgatagactagtgtcctaatttctgtaccaagtctagattgaacaaatgtgaagattttgccatatttgttttagtttaagggagaactaaatacaatatttattgattgtaataaaagatacaattgatgttctctttgaacccttccctaataccactctgctttctcctttcctccccagagataattgcactcctgaagttagtgtttattttcctacttatggtttcatatttatgtctgtaaacattataaaatattatttagtgtgctttcttagtttttaaaccattttttgttgtaaaaaattatacataataccttatttgtaggtgaacagttcagtggctcttatgcacagtgttttgtacccatcaccactgtctatatccaaagcttttcaatcatctgcaacatcaactttctccccattaaacaattaactccccttttcccctacccccatcttctggtaggtaacctgttttctgctttctgtccctatgaatttgcccatgctagctacctcatctaaatggaatcatacaatatttatttttctgtgtctggcttacttcactaaacataatgtctttgaggtccatcatgttgtagcatatacagtatcaaaattccattcctttttatggctggatagtattcttttgtttgaatatacagtattttgttttgccattcatctattgatggacagttaggttgtttctaccttttggctattgtgaataatgcttcaatgaatgttggtgtacagatacctgtttgagtctctgctttcatttcttttgaatgtatacctgaggatgaaattggtgggtcatacggtaattctgtgtttcattttttgaggaactgtcaaactgttttccactgtggctgtacctcctcctcctgggttcaagtgattctcctgcctcagcctcctgagtagccaccatggccggctaattttctgtatttttagtagagatggggtttcaccatgttgatcaggctggtcttgaactcctaatctcatgatctgcctaccttggcctcccaaaatgctgggattacaggcgtgagccgctgtgcctagccttatttagtgtgtttttaaactttttatacgtggcatcattttgttcatttactggcccacatttttactgagcatttttaaaagagttatcaatgttgatttaggtagccataattcatttgttttaaatactacacagtatttttattacatacatattacagtttattcatatatttccctactgttgggcacttaggttgtgtccggtcatcctagtttaaaagtagtcctgtaatgaatgttacaaatgttttttgcatatgtacaaatggcccttgacttatgatggtttggcttttgattttatgatggtacaaaagtgatactcattcagtagaaacagtcatttgaatttttatcttttcctttgctaatgatatgtggtatgatactctctcatgaagctgggcagtggctgccaatcacagctcccagtcagccaggtgatcgcaagggcaaccaaccaatactctacagagtactgtattcaataaagtatgtgaaatattcaacagtttatcataaaataggctttgtgttagatgattttgcccggctataggctgaaggctgtgttctgaactgtaagtgttcagaacacatttaaggtaagtgaggctaagctatgatgtttgataggttaggtgtagtgaatgcatttttgacttagtggtattttcaatttatgatgggtttatcagaatgtaaccccagtgtaagtcagggagcatctgtataaggaattagggtttatacctagaagtagaattggatcataaaagccttttcaactttactgttgcaaaattattatcccaccagcagagtgtgtgtttccatttcccttattcttcttggtgcttgtcatatcctgcaggtgtgaaaatcatatcttatctttccttggcagctagtgaggtttatcatctttatctttgtttattgaccactcagatttcattaggtgtgaaattcctgttcatagtctctgtcagtttttctttgggataactttgtcttttgaattcaatttcagaaattctttatatattctgagtactaattgtttgttttactctaaatatctcctaatctgtgtctttctggtatcattttcatgtagaatggtgcagttcaatacagtagtcactaatttaaatataagtttaagttcagttcctcagtagtcacatgtggctagtggctactgtattggacagtgctggtaataggacatgtctatcatcacagaaagttctgttgcacagtcctgatatactaggttttaaatcttaatagatcatactttttcatcatggactgtgatttttgtgtctttgtaaggaatccatctgaaccctaatgtcctagaggtattctcctatgttttcttttaaacattttgtttttcacattaggtcttagaatttgtttagaatttatgttgatgtgaggtcaggatctgactttattgcttttttatatggatttttatttcagcaccattattttagtagtttatccattctttgctgaagtgtaatgccttttctgtcatttggcaagttgtagtgtacgtgtggttctttcctagtggagtttctttgtgacttatttgtggattttttgtttgtttgttttttggtatttttcttctccttctccctcccactcccagtccgtttatatatccttctgtcaatactaggttgtttcaattactatggtttttaaatgcttggtttcaaatacttggtacttgtttcaaatacttggtatctacttggacaagtctctatccttatttttcttcttcagaattgacctgaatattatttctttttttttttttttttggagcttttaaattcatgtataatagttgtacatactgaatattttcttatcctttgttctttcatttttgaatttgggatcaagttttgttaagtttcattaaaaaataagttgtgttgggatttgtttggaattgcatggaatttatagatcaatttgatgagaactggtatttttatactattgagtctgacaatctttttattcagtttttctatgtccctctgtaacatttaatcatttttttctttaaaagcaaagcacttttttaacaaaaattggccaggcatggcggtgggtgcctgtaatcccagctactcaggagactgaggcaggagaattgcttgaacctaggaggcggaggttgcagtgagccgagatcgcgccactgcattccagcctgggcgacatagcaagactccatctccaaaaaaaaaaaaaaaaaaaaaaagcgaagcacatttttaaaggatttttattgttcagtcgtgttaaaacttttatttgggatttttatttagaatttttatttataaatgaaactactgtatacttgagttgtgttgctggtgttttggtatcaaggttatgctagccccgttaagtgagttgggaagcttacttttcaactcctgtttttcaaaacagtggatatttgggatttctagaaaattctaaatgtgtttttcagcttgcaagcaatactttgagaagtatccaggagaccatgaactcctttgggaagttgaaggtgttggacactggtaccagcgaataccagtcaccagagcattacaaagagaagcacttaaaattctaggtaagagtgttttcagtttgaacataagttcagtttatttatttttggtagcctgtccttgctggcccataagtccagtttaaaaagcagaggctaataatggttgtgtcttagagtccagagtggtagtgtattataatgtgattgttctagtaacagactctcttgtctaaggtttgaattttggtaatgtattaacttttgagtccttagtaacaaggagacctagaacagcccagtaggaattggtgggtaagaaataaacgtagattactcaaacggcatagaataggcaccagggggtccaaagtaccccttaatctcatgcacttctccccaaagctactaaatacttaaaataactatttaacattgtatataatggcaatgttgcattataggatattggtgaagagaacatctcacacctagattttcgtgacccttctgtccaggctgctcttcagagcttttaggaaaatcagtacaatgttagagttaaaaccaaatactgattcggttacagtttttaaaattcttctatacgcagcactttctcaaaatgaacctaaaagacctatgtctggagaatatggtcctgcatctgttccagaatacgaagcaagaactgaagacaatcagtctagtgagatgcagctaactgtaggtacactgtctatatgtttattgttgtatataaaatttttgtgtttttaaaaaatagatacaggttatatttgagttttaaatgtcatagttcattcaacaaagctatgtaatttctactgtgttagttttcctggcatcttctgttaatattactaaggactttaattttctttgaaaaataattttaatgatgttaaaagtatgagctaatttaagggtaatttagaataaacataaaataatatagaagaaaataaaaatctataatcccactattcagatatagccactgttaaaatttttgcatatatatttaatatcgcatattataaagcatgtatctgtatatattgtatttttatttttattctcttggattgcttctaactgctgttctccattaatgtaatattggaagcattttctatggcattaaatcattaaaatgtgattgttacatagcagcacactattctattatctattttatgtaactatcattatttgtttccttaacataggatccttaaatttttaacatttttaaatgacccaggagcaaacacatttatatatgaatccttgtgtatatgtaattacttatcttaacatacaaatttccagaagtggaattagtaggtgaaagactatgaagttgttatgttgtaaagtttgaggctgtatatgctagtctttgtagaatgtaatgcactttgcaaatattaggtatcctgaaagtagaaggacaggtcccgttaccaaactccacaggacttaccaggtccttttctagaactgatgttttgtggtactgcttaaaatatggcccattgatgggactctagaagtctagggttttgggggatggcatttattacagtcatatttttgtatgtgtgtatctaagtttatttttggtgagtgttagaaacactacatatgttgtacgtgtgtatctaagtttatttttggtgagtgttagaaacaactgctttagggaattatttgtgcttattttctgtctcaattagcatgagagttgactattcgagtggcaaatttgtaaacatttttaagaataacaatatatgtaaggagttagattcttgggatttttttttcctacttttggaaattcagacttgagaataagctcctgttctactgcagtccaaattcctgagagatacacagattcatttagtattggccagttataaaatcaaggaaagtagaaaatctactcttcctataaatgtaacgagagcaatgatttactttaatactaagccaaataattttagatgtgtcatttgagtgagaatatatgacagtggtactatatcatacagttgacagcataaattagattttagaatctaacctatttaagattttagaaattcatattcttcatattactttaatgttttaaatagttgaaggaaatgtttatcatattaaactatttatatctctttttgttagtagccacaaatagtttagtttatttcaactacatgatttattctttaggtgatgatggtattgttacctgctttttcctattatttatcttacactttttgcaccttttatttattcatctttatctacattttaaccttttcttgttggactacaagttggttgaagcaagatatttgtcatatgatttatcacaattgctcccttgcttttgttctataaattgaaggctgtgtgcccactatattgtggagttttagtaagcatgtaatggatgaataaagtagttactatggcaagcattggacatataaagatatggttcttagacatgggagaactagatggtccattgttggaaatatataatatactatagcataataattgctttattatagcaagtaattggaggtacataggagaggatgacttttaaagggtgggtgggaattttcttagggcattccagacgatagcatgtaaaaaagttacagaggtgtaaaggaaatggcatgtttgatatgaaagaggtatttggtattgaataggttgagaatttgtattctaagcagtggttggccattaaaagttttttcctctttttttttttatcaaaaaaatggtacaatttgtgattcgaaagtatcactttgtcatcagggtggaggggtgtagatgggatgtgattagaatgagggatatgagtgaggaggctgttggaatagttggttcaagagactaaagatataaactaaagcaatggtagtacaaaggacaggacagttttgagagattcttcagttaaaattgaaaggctttgtgattgattacatgtgagttaggaagaagtcattgctgactcactgttttctggctagaatgactgactgaatcgtcattaagcaagatagggaataatattggggaaagataaagttcattttgggaatgattgagtgtgaaattggatgggacatccactgggagatatttcattggaaataaagctttggaaatcaggaagaaagtttggaggcttaagtctcatatttgaattcatcaataagcagatactgaagtaagcatagtgaagggagagcatgtggactgagcagagaaggtggctgaggacagaactaggagacactagtggacacactatgacatattagatgacttgcatatgttctcagtcttttaaactgaagctgaactataacctttttatttttaaagtaaatgttgttaacaaaaagtgctatttggaaaacattttacaagtttttctttgaaactataagtgaaatagatccatagggagaaaaaatagtctaaaactttgggtttgaatctctctcttttttagattgattctctaaaagatgcctttgcaagcacttccgaaggtaagaaattcaactgatatatcagtaagtatttgagacacttcaaattagggctgtgtgtgtgtgtgtgcatgcatgtgtgtgtggtgtgtcaccctgagaaagtgaagacttaaccagctctaaaatctagatctgggttctcatgccaccactgccactgattttgctatgtgaacactgagtaagctattgtacctctctcttccttgtttccttagctataaaatagggatggtaatgtctacgttgtttattttccaagattattgggagggaatgcaagtgaaatacaaaaacactttgcaaagcccaagataacatggaacgtgaggaatgacttacacagttcatataacttgacaaagttacataatttagaaaaagatgtaaattataaaataattttcttagcctgacataagtgaggggagggtgaacctgtgtaatgtggaggatatgtgtaaactagtgtagttcttgcatttctgtgtattttaataggtagtccttttaatatataatcaattaagtgcagttttgctgtttttctcctcaggtcatgataaaacatctgtttccactcatactcgaagtggtaatctaaagcggccaaagattggaaagcggtttcaggattctgaatttagcagttctcaaggtgaagatgaaaagacctcccagacttcacttacagcttcaataaacaagtaaataattgttgattttactctcattttttatttgtacttttattttttgtttatacttttatattatcaatatttaatattttatatataatatatactattttatattgtttattatacttttggtatacttttaatatacttttaatatactttttggtatttagcatttaaggtagaggcgattacattgtttgtgtagcagatgactttggtgtaggagtttgtatttgaattatttatatttgaattattgtacaagattattagttgtttatcagtgctaagtgttgccttgacaatgctattgggagaagctgctaataagagactggcataaactcacttcatgtgtgacaatccaggagactattctagtgattatattatcccaaattagtcattatcaccacgctgaatttgatggtatggttttaagtaatgctgagatatagtcagtttttttccccccgcattcaattcttttatttaattttctagtggacagtttacatatctccctgtcttttaagttagtgtgacaattttccataataaactacttaaaagaaaagctttggtcaagaatggaatgaaattgcaaaaaaaaaacaaacaaaaacattgcttttaaaaaaccaacattttcaccaattttatattcaaacaaaaccacatgatattggcgtgatatgtgttttcagtgtttccttggggctggcttcctagccatcgtgccacggcacagctgcagtcagccatagtttgtcacgctggatggcggaggctcactcagcttcaaattatccttgaaatcccaaattgtcatggctctccatcgatgccagtagtgcaatatttgcgacaatctttctcatccacctcataaatagagacttgagtgatgctattctggcgcagcatcttcaaagccatgttggagccctcagtcgtggccctcttgtccgtgttgcagaagcattccatggcagacatgttgcgttggatgctctgttttggaatgtctaacttggagacaaaggtcaggcagccacggtcatcgtagttcaagagcattggtcagcagtcatggccagcagccacggcgctgttgtctgagacagatgacacactcaggagcagctggaactccgtcttcagattgagacatgcacactttttgaggcatcagcagcagacatggtgctgtcgtggctggcccaggccaggtggctcccactggcggagaagctgaccccgtggacccagccaccagtgccaccgccaccagactctgacatcagctgcccaaaaagcatcttgctgtcccagggcatgctggccagcttttcatccacttctttaatgtaggaagaaaacactctgtgtttgaagtcacatgatcctgctgccagcaaaacattgttgggatgccaatccaagctgaggactgtggagcgaatcagctttttaatgtgcttgctcacccaccagtcattttcagactcaaagtaacaaactgaaatgagtcgtgcttcacttcccacagcaaatttgttctctagggcggaccacttcacaaaagtagctgtgcgattaattctcaggatcatcagtgttggcttccagacaccatctttctgactccagacataggcattgtggtctgccccacaagtgacgatgtggtcatgcttgggagcccagtcaatatctgtgatgtgtccattgtgctccttgagttcgtgagctttcacacactggcgcccattcttcttatagatgtgcacttcgtgattattgacactgagggcaatctgggtacgatccctgtttcaggcacgacagttgattggctctagtaaaaactgatgcagtgacattattcttagtgttttcaaaggagagaaagctggggtcggggcagtccggacggtcttggagcagaggatttacggactctgggcagtcgatgtgaacagggctctagtcagttttaaaataccctcaattttactttattgattcattttactgggctattggatataaattagtgataaccataaatagtacagtgaattccttcaggaatttagttgccaactgaatcaacagaacacttgagtctcagctttatcctctttctttgaatcttaaagcaagactctaacttttataataaaataagatttctgccctaacagttctgccaactgttcctgagtcaaccatttagttaattcataactttgccattttaactgtcaaattattttagtcaagtagagaattctgtagctgtgctaatccttatacaaataattttaaatttgggtaataaagtatgtaaatgttttgttttggtgaaaatttgtaatgttaaagatagatataaggaaatatttaaatctagtaataaaaatatgagtttagaaaactgtggttttctcactgagcaatattttgatatagtaccctttttagaagggtaacaatatattttaaattgaacctcccagaattattgtggaattttgtttgcttttcataaacggaacagttaggagtttatgcttgactgtttgctgaaacatacgaagaacaaaacatcatctttgccctcaaaggattgactgcctaggggtaaagagagatatgtacacagttaagagcaccgtaaggcggattgtgatagaacagtaatggaaagtgcagaatgctgtggatacagaggaaagagtgttggattctaattgaggggatggagagatttggcatttgggcctgggcttcaaagataagtagaaactcaacaagcagagctgggagagaagactttctagtgtaaaggtccaccaactatggcctgtaggccaaatctggcctgccacctggttttgtgaataaaatttttttgtaagacacccatgctcattaagcttatatatttttattgtttattaagcatatatatttttatatattattaagcttatatatttttagttaatgtttgcattggaacggcagagttgagtgtttggaacagagaccatatggcccacgatgcctaaaggaaaggtttgctgactccttatctacaccaaggctgagaaatagaactttctgcagtgatggaaatattttgtatttacactgcccagtatgatagccattagccagtgtgcccattgaacacttgaagtatggctagtgcaactaaagaactcaattgtttcatttaattttaatttaaatgtaaaatagtcaagtgtgtctcgtggctattgtatctacagatttcgactaaagcactaacatgagcaaaggcacaaagctaggagggatgttgctaaggataactgatgaataaggtaaataaaattataagggtctaggctgggcacggtggctcatgcctgtaatcccagcactttgggaggccgaggcaggtggatcacctcaggtcaggagttggaaaccagcctggacaacatggcaaaaccctgtcactactaaaaatacaaaaattagccgggcgtggtggcacacttctgtaatcccagctactcaggaggctgaggcaagagaaacgtttgaacccaggaggcggaggttgcagtgagccaagattacgccactgcactccagcgtaggtgacagagggagaccctgtctcaaaaacaaaaacaaacacaaacaaatatgttaggctttcaaagaaggtacactttattcactgagcttatagagaaccaccagacgtttctgagctgggctatcacaggtgtagatgatgtgcattagaaagccagctctttgaaagccttgatgaagatgtactacaagtctgaagctgaattggggagaagtacagtggtccagagagaactggggcctgaagcagagctgtgaaaatgggcatagaaagtcaggaatatatttgaaaggcagttttggagttagaactaaaccatataatgtgttgtccaaggtgacatttttgagaatgaaaggagcattattaataattatgccagtatccataattatgaacaaaagtctgtaaactgggactgctccaggtaaactgggatatatgctcattctaatagaataagatccatggtccttcagtataaatgaggttaaaaaaaaaaaaaagattcaggctgggcgctgtggctcacacctgtaatcccagcactttgggaggccaagatgggcggatcacgaggtcacgaggtggagaccatcctggctaacatggtgaaaccctgtctttactaaaaatacaaaaaattagctgagcgtgatggcaggtgcctgtagtctcagctgctcgggggctgaggcaggagaatcgcttgaacctgggaggtggaggttgcagtgagccgagatcgcgccattgcactccagcctgggcaacagagcgagactttatctcggaaaaaaaaaaagatccattaagatatggatagaataaaagaagaagggtctagtttacataattgagaagatggtaatattataagaggatgaagagattggttttagacttgtaaaatctgaagttgttgacaacatagttgattctctaaaatgttactttaagaaaggacttctgagattttatatttatccttaataaaacaagtcagaatggttttcttttgttttttagattggagtctactgcacgcccatcagagagctcagaagaattcctggaagaagaacctgaacagagagggattgaatttgaggatgaaagcagtgatagagatgcacggccagcactggaaacccagccacagcaagagaagcaagatggtgaaaaggtatgagatcacttattcagcaaaatgaaaaaaagtaaactaaattttacctttcttaatcacatgttgttagaaaagtatagcgatatattttagagtgttagaaattgcgtttagtgttaaaaatcatatatattaagcaaggtcaggtactagagttggggagaggataaaattacaaatatgattgtgtttataaaagtttgagcttataaaagtttgaattatatcgaagataaaatagagatgtttagtaagatcttttggtgcatttaaagtataagttaatttgtggaattaaacacacttacatacacaaatgatataagatctaccttatagaaccagttaaaatgctttcaggtgcaataaaccttcaggggcacccccattttagttagaggggtaggaattactaatccagaaaaaaaatttgatgactgttgatctcacaaagttctggaaaaataactaaattcatgttttttaaacactagaaaaaaatatataaacccttggtaactaagtaaactcttcatctgggttgatttctgcagctttaaagtatttatccccagcttcttttttctttcctctatccatttccatttttctctttagtatcttcaatcttttcctttccacagattctctatttcttctttcatatgttcataaatttcttgaaaaaatctttcagctgtttgccaagtctagcaggcaggtgaataagtgaaattatattaccaattttgttttctttttctttttgagacggagttttgctctttgcacccaggctggagtgcagtggcgtgatcttggctcactgcaacctctgcttcctgggttcaagtgattctcctgcctcagtcttccaagtagctgggattacaggttccccccaccatacccagctaatttttgtatttttagtagagacggggtttcaccactttggccaggctggtctcaaactccttacctcaggtgatgtgcccgcctcagcctcccaaagtgctgggattacaggcgtgagccaccgtgcccagctaattttgttttcttaagttactctgatttagctcctgcttcctctatttcatgaaatgacatatgttatgtcagctcactgcagcctccatctcctgggtttaagcaattctcctgcctctgcctcccgagtagctaggattacaggtacaccaacacgcccggctaatttttgtgtttgtttttttttttttttttgagacggagttgcgctctgtcgcccaggctggagtgcagtggcgcgatctcggctcactgcaagctctgcctcccgggttcaggccattctcctgcctcagcctcctgagtagctgggactacaggcacacgccacaacgcccggctaatttttttgtattttttgtagagacggggtttcaccgtgttagccaggatggtgttgatctcctgaccttgtgatccgccaagacggggtttcaccatgtttgccaggctggtcttgaactcctgatctgctcctcttggcctcccaaagtgctgggattacaggcatgacccaccatacccggcctcatgaaatgatatttttatgtttattttcgtaatatttctttttttttttgagacggagtctcactctgttgtccagcctggagtgcagtggcacaatctcggctcactgcaagctccgcctcctgggttcacgccattctcctgcctcagcctcctgagtagctgggagtacaggtgcccgccaccatgccccgctaattttttgaattttgagcagagatggggtttcaccgtgttagccaggatggtcttgatctcctgacttcatgatccgccgagacggggtttcatcatgtttgccaggctggtcttgaactcctgatccgctcctctcggcctcccaaagtgctgggattacaggcatgacccaccatacccaccctcatgaaatgatatttttatgtttatttttgtaatatttcttttttttttttttttttgagatggagtctcgctctgtcacccagcctggagtgcagtggcacaatctcggctcactgcaagctctgcctcctgggttcatgccattctcctgcctcagccttctgagtagctgggactacaggcgcctgccaccatgccctgctaattttttctatttttagtagagacggggtttcactatgttagccagtattgtcttgatctcctgaccgtgtgatccgcccgccttggccttccaaagtgctgggattataggcttgagccactgtgctcagcctatttttgtaatatttcagtagtttttggggagcagatgggtgtttggttacatggataaattcattagtggtgatttctgagattttggtgcacccatcatccaagcagtgtatactgtacccaacgtgtagtcttttatccctcacccgcctcctaccctttccctcaagtccccagagtccatgataacactcttatgcctttgcctcctcatagcttagctcccacttatgagtgagaacatacgatgtttggttttccattcctgagttactccacttagaataatggtctccaactccatgcaggttgctgtgaatgccattatttcattcatttttgtggctgagtagtattccatggtctatatataccactttttttttttttttttttgaaatggactcttggtctgtctccaggctggagtgcagtggcacgatctcagctcactgcaacctccaactccctggttcaagtgattctcctgcctcagcctcccaagtagctgggattacaggcacatgccaccacacccagttagtttttgtatttgtagtagagacggggtttcaccatgttggccaggatggtctcgatctcttgacttcatgatccacccacctcggcctcccaaagtgctgggattacaggtgtgagccattgtgcctggcctatatataccacattttctttatctactcactggttgatgggcatttagcttggttccatattttttgcagttgcaaattgtgctgctataaacatgcatgtgcaagtgtctttttcatatgacttctttttttctgggtagatagccagtagtgggattgctcaatcaaatggtagttctacttttagtactttaaggaatctccacactgttttccatagtggttgtactagtttatgttcctaccagtagtgtaaaagtgttcccttttcaccatatccactccagcatctattttttattgtggccatacttacaggggtaagatggtatcaaattgtggttttgatttgcatttccttgataattagtgtattagtcagggttctctagagggacagaactaataggatagatgtatataaaggggagtttattaaggggttttaactcacatgatcacagagtcccacagtaggccatctgcaaggtggggagcaagggagcaagggagcaaggaagcaaggaagccagtccgagtcccaaagctaaagaacctggagtctgatgtttgagggcaggaagcatccagcacaggagaaagatgtaggctgggaggctaagccagtctaatctctccatgttcttctgcctgctttttattctggccatgctggcagctgattagatggtgcccacctggattgagggtgggtttgcctcttccagtccactgactcaaatgttaatttcttttgataataccacccttacagccacacccaggatcaatactttgcatccttcaatccaatcaagttgacactcagtattaaccattacaagtctaccccttgtcagcctgaacccatacacacttgctgagatcatacataatcttcaaataaagacaataataaggtaataattatgcctaacataatacaactgtcattcgtacaagtggaaacccccaacccaaataatattacataaacacttaatgctgatatgatgtcaataaatcttatgtcacatgataaaggaaaagggaaataaaatgaagatattttcttagtacaaatgtatacatgcacaaacatgttcttaacaaaataaggaagaaatactcatgacaattacagtcctggtttctgcagctggtcacgtggtcgaagctggagttgatgactaccttcttctgctactcattctgtattccctttgccttcagcaagcaccttagtgggtcatgtttttttttcctagtggagtaacccaaaccttcattcctgaagggtctgggccatttgtagtcttgcctggattgggctgttgtagtttcccattgaccttaatcacagggcatcgtaatactaagagacaccccaagggatctcctatattccatgcatactcttccttacctccattgtggagtagtagactgatttcatcttgatagtctgggtcagtcaccccagccaacactgtaactccctccttagcctgttgacttaaaggtaggaggagcccaaagtgtccaagtggcaatcttaacttccagtttaatggaatcattgttgtgtctcctggtggcagcgttcgtctctctggaactaataccactaggccagcagaacgtaatgtcatggggacaggaagcaaaaatgtttctagtggatcactaggggtgatggtgagtgatgccatttccacttttacccctggattcctggacctgtgaatcctggctatgggagaaacagtaccatatactggatgcttattcagagcatacccagcctgctggagacctttgccgcagccctgctaagtattatcacctagttggcgttgtaattgtgacttcaaaaggacattccaccattctgtcaatccagctgcttcaagatgatggggaacatggtaagaatagtgaattccatgagcatgagcccactgccgcactgcttttgccgtaaagtgagtgccttgttcagaggcaatgctgtgtggagtagcatgatgatggataaggccttccgcgagtccacgggtggtagtcttggcagaagcattgcgtgcaggagaggcaaactcatatccagagtaggtgtctattccagtgaggacaaacctctgctctttccatgatagaagaggtccagtgtaatcaacctgccaccaattagctgtctgatcaccccaaggactggtgtcatattaagggcttagtgttggtctgtgctgctggcaagttgggcactcagcagtggccttagccaggtcagccttggtgagtggaagtccatgttgctgagcccatgcgtaaccaccatccctgtcaccatggccactttgttcatggacccattgggtgatgacaggggcggctgggtaaggaggctgtgtggtgtccacagaacaagtcatcctatccactcgattattaaaatcctcctctgctcaggtcaccctttggtagagtactcacaggggatacaaataacttcattttttcaccactcagagaggtccatccacatacctcttccccaaatttgtcaccagttttccaatcatgcttctttcaagtccctgaccgtcatccaaaccattggctgcagtccatgaatcagtattatcacacatctgtctatttctacttccttggaacgtgcacaaccaggtgcactgctcgaagttctgcccactgggaagattttccttcaccagtgtccttcaggaaaggggctatagggctgtagctgtccacttttgggtggtgcctgcatatcatgcagaaccatctttgaaccagtccctagtcttctcttcctctgtcagctgattatagggaactccccataaggccatcggtgcaggctagggaaaagaaggccagggtggcagcagtggagaccatgggcgtttgagccacttcctcatgtaacttacttgtgtcttcaagacctgctcaagcccgatcacatatataccacttcaatttgatgatggaatgctgcagtgcatgacccactttatgactagatgggtcagaaagcacccagttcatgataggcagttcaggtcacatggtgacttgatgacccataatcaagcattcggtttctaccaaagcccagtaacaggccaagaactgtttctcaaaaggagagcagttatctgcagaagatggcagggccttgctccaaaatcttagaggcctccactgcgattcacctatgggagcctgccaaaggctccaaacagcacttgtctctctaaaggagagtagttatctgaagaagatggcagggccttgctccaaaatcctagaggcctccgctgtgattcacctatgggggcctgccaaaggcttctcacagcatccctgcctgccactgacacctcaagcaccattagatctgctggatcatatggcccaagtggcagagcagcttgcacagcagcctggacctgtcgcagagccttctcctgttctggatcccactcaaaactggcagccttttgggtcactcgataaatgggctggagtaacacaaccaaatgaggaatttgttgcctccaaaatccaaataggccaacttgtgctgtgcctctttcttggttgtagtaggggccaaatgcagcatcctatcctttaccttagaaggaatatctcaacaggccccacaccactggacccctagaaactttactgaggtagaaggtccctgaattgtagtcggatttatttcccatcctctggcatgcaaatgtctcatcaataagtccagtgtgtttgctacttcttgctcactggatccaatcagcataatgtcatcaatgttatgggccagtgtgataacttgtggaagtgaaaagcgatcaaggtctctttgaacaaggttatgacacaaatctggagagttgatatacccctgaggtaggatagtaaaggtgtgttgctggccttgccagccgaacgcaaattgcttctggtgggccttatggacaggaatggagaaaaaggcatttggcaaatcattggctgcataccaggtaccaggagatatgttaatttcctcaagcaatgaaaccacatctggtgcagcagctgcaattggagtcaccacttggttaagtttatgatactccactgtaattctccaagatccgtcttctgcacagaccaaatgagagagttgaaccgtgatgtgatgggaatcaccacccctgcaccgtccttgatggtggcactaatctctgcagtgcctccagggatgcgatattgtgtttgattgactatttttctttcttttttttttttttgagatggagtttcgctgttgttgcccaggctggagtgcaatggcacgatcttggctcaccgcaacctccacctcgtaggttcaagcgattctcctgtctcagcctccctagtagctgggattacaggcatgtgccaccatgcccggctaattttgtatttttagtagagatggggtttctccatgttggtcaggctggtttcgaactcccgacctcaggtgatacgcccgccttggcctcccaaagtgctgggattacaggcatgagccaccgcccccggcctgattgactatttttctaggtagaggcaactctaatggtttccatttggcctgtcccaccataatagccctcaccccaccagtcagggagccattgtgggggctctgccagctgttaagtatgtctatgccaattaatgcattctggcactggggaaatgaccacaggatgagtccggggacccactggaccgactgtaagtcagacctgagctaaaactccattagattacctgatcttcataagcccctactttaactggaggaccacagtgacgttttgggtcccccggaatcaacgtcagctcagagccagtgtccagtagtccctgaaatgtctgatcatttccctttccccagtgcacagttaccctggtaaaaggccagaggtctccttggggaaggatgggagaaagactcacagcataaattgtctctactgtagtggggtccttcctcaaggggcttcattcaaggtgttctgggtctataaagtggctcaagtctggaaattgaggggctgtgattctctcttttttttaataattcagattagtcttttgtccactcgacctggaagttttccacttatatgaattaagtaggaattcagtaggcttcctatcaattccacttctgggaacactgtgattaattagccagtgcaaaagctgtacacaagtcagattattctgattgctgctttgcctctgctgcggtccattatggtagctcgcccaccttgcatttgatggttgagtgctcccacttggcctctgccacgtcaggatccaattattcccgttctaaattttgtagttgagtgactgcagttcccactgttagatttggcatacagagaagagtaatcatagagctctttgaagattaacatgctgccctcacaaatctctttcgcaaagcatcggtcaagggtatatcttctggaccctcccagctgggatgagtaggtctaaagtgactaatccactccaccatcccaatctctctaagcctttggatctcttcctctacattaaaccaagggagatcagcatttccagctcgctcagagtgagccatcttttaatccgtatttcagctaaccaagcaatcaagctattagaacctttttaaattccctgagcagcaacattaaatgcagagtccctacttagtgggcccgaatcaataaattcagcctgatcgaactctatgttccttccaccatcatcccacacccttaacatccgttcccacacctgttctccagattcctgcttatataaattagaaaactctagcagttcttttcaagtgtagcacacctccttgtgggtcacactctgaacttcacctctaggaggccaccgggactttagtccagttataggtctagaagcaaacagggctggctctcttctcctgaggtgatgttaccactactggggatggcgaagctgtttcttctggcaaaaagtctcatcagagtttacaagctctgtgtccccagcatcatcagggtcctcccacgtgtccccattccaagttgcagggtcccattcttttccaatcagggccctcactttaagagtagacacctggcgaggctgtgcatgcacctttcgttgcaggtcagccacttacatgataagaggttgtgtctgattttccacaatttcagctctttgtctacaggagataagactctcacttggggcttttaaagcgagtatctgcttttgaagccaggagttagaatccctgagttcatcattgtctttcatcactttgtccagtgaacttaggagcagccaactaacttcattatgttccttggttctccatatggtcaaaggtattatgtttagagtcaccaaacttcttccctctcacgagcggtgtatcaggagtgtcaaatgcatttattttgcataactctaaacagttcatgccaaagactatcagtgttctccatactattagaagtagagtccttagcattttggtgtctgatcatattaaggagccaacttcagaaaccccaaaacctacgaaagaactccatccttaatattctgttcctctagaaccactcctggtaccaaagcctgttagggttctctagaggaatggaactaataggacagatgtatatataaaggggagtttattaaggaatattaacttgcatgatcacaaggtcccacaataggctgtctgcaagctgaggagcaaggaagccagtctgagtcctgaagctgaagaacctggagtctgatgtttgagggcaggaatcatccagcacaggagaaagatgtaggctgggaggctaagctggtctaatctctccacgttcttctgcctgctttttattctggccatgctggcagctgattagatggtgcccacccagattgagggtgcgtctgcctctcccagtccactgactcaaatgtttatctccttatagacacacccaggaacaataccttgcatccttcaatccaatcaagttgacagtattagccatcacaattagtgatgttgagcatttttccatgtttgttggccatttgtatatcttcttttgagaattatctattcatgtccttatcccactatttgataggaaactatatatatacatacgtgtgtgtgtgttttgagacagattctctgtcatgcaggctggagtgcagtggcacgaactcagctcactacaacctccacctcctgagtttaagcgattctcatgctttagcctcccaagtagcttgaattaggcatgtgccaccatgccaggctaatttttgtattttcagtagagatggggtttttgccaatgttggccagtccggtcttgaactctggacctcaagtgatcctctcccctctgcctcccagtgtgctgggattacaggcataaaccacggcgcctagctggaaactgtatttttaaatggtacttttattgtagaaaattgggaaaatgaaaaaaagcacatataggaagttaaaagcacgtattttttaaaaacaggatttgtatgcatctagatgtttatggaaatacgtatttgtggggttttcttttttttcttttgagacggagtctcgctctgttgcccaggctggaatgcagtggtgcaatctaggcttaactgcaacctctacctcccaggttcaagcaattctctgcctcagcctcccgagtacctgggattacaggcgcctgccaccatgcccagctaatttttgtatttttagtagagatggggtttcaccatcttggccaggctggtcttgaactcctgaccttgtgatccacctgccttggcttccaaagtgctgggattataggcgtgagccacggtgcctggcctttttttcacttttaaaaagttaagattatattgtacatacttcatgtaacctgtttcatcaataagacatataccagtgacagtgacaactatcattttcatttttttttttttttttttgagacggagtcttgctctgttgctcaggctggagtgcagtggcgcgatcttggctcactgcaaactccgcctcccgggttcacgccattcttctgcctcagcctcccgagtagctgggactacaggcgcctgccaccacgcccggctaattttttgtattttttagtagagacggagtttcaccatgttagccaggatggtctcgatctcctgaccttgtgatccgcccgcctcggcctcccaaagtgctgggattacaggtgtgagccaccgtggcccagcctattttttttttttttttttttttttttagcctgggttgattaccctctcttcctgaagttctctagtctcctcactttataatactattgcactttggtttcttgtttttttttttttttttttgagacggagtcttgctctgtctcccttggctggactgcagtggcatgatctctctggctcactgctacctctgcatcctgggttcaagctattctgcctcagcctcccaagtagctgggactacaggcgagtgccgccatgcctggctaatttttatatttttagtagagagcgggtttcaccatattggccatgctggtttcttgttttttctgtctctgaagtattatttttattttttgactcttctcctacttgccttttcccccttattgtggacactctagaaaaagtccttgattttctgaactttggttcattttatcttttttgaaaatacatccgatctcatgacttcaactgttttatctatgggaatgaccagtaactctagattatatgtctctcgactctggtcatttttatgagctttatattaccttctgtgtgaactctattctgtgtatcatatgatataataaaatagatattttatagacaatttttattttagaacaatttaataaattttttactatagaaaaattaaaaaccgtgatttctcttttggaaaaatttccttgatatgcttttaggggtcctacacagtcaaatctatttgtgaacacttgaatgcatcagttttataattttaataatggtaataaaattccccttaattattagaatgtcaggattagaaatacttgatattaaatagaagtaaatggataaacattgggagaattttagaaattggagagttcatgttatcaaatagcatttccatactttaatgatatgcaaggagcaggactgttcagaaatgaccctggtgttgactgagactagggctctctcctcccagcaagatgcagcacccaaactgaacttcccataagactggtagtgcttcctacctctggcacagaaaactgtaatttcccatagattccagatgctgaacagctggtgttatgtaaagagctagcatcaagtctatactctgtctggtgcctttttcctgaaaaagttctttccctgattgccctctaagaaggaggaacaacaagtgggtagggtcttttcattgaatctccgacccatactgtgtgtccacagagcatcctggtcctgccccatctttccttaagagcagtgggagtacggggtactcaggattattttattttgctgatattgccttatgagtttcctccttcccccagtaagactgttctttaacccatgtcctataatgtaaatttgagtcttggtgtaggataggtaggcactgagaagggacccgtcatgcatgacaaataagttagtttgtaatcatgtccttactttttccctctctcctcatggtgtaggaatctgaattagagcctatgaatggtgagataatggacgattctcttaagacctcacttataacagaagaggaagactccactagtgaagttttagatgaagaattaaaattgcagccttttaattccagtgaagactctacaaatcttgttccactggtggtagaatcttcaaaaccccctgaggtagatgcaccagataaggtaagggggcaatgagctattttttaataaagtttaccaatgttggtgacattagcgaggagggtgcatggtatatatatttgcttccacctttacatgtacagtgctttaggaagattaacttttatactagatttgatattataagaaaatcagtaatattctataaattcaaataataaccttattcatatctgatatgtggtaacaaaatgagttttattacttttaatactttgtagttaggaaatgcttagaaaattggataaagcattatttaccaaatatttgagtacctatatttgttacatagactatgaccaaaacagtaatttatatttgttttaattaggcagacagattaggttagtgggggaaaaaacttgttggagtattttaaaagaaatttaattttgttacttttgaatattacaacttatggctaaaaaactgttgtatggcattattagtgtctcacctaagcaaaagaataaaacttccattgccctaacttatctaatgaaatcgtagtcaaacgtagtgtggtagcgcagtgaagtcccaaggtatttttggttctggctccagtaacaccaggaaactaaaaaaactgagttgattcatggttttaaagaatcttgatatgaagcttaatgtgtcttaattatgaaataattatttcattatatcctcaaagtaataacttagtattaaaattaccatgtgaaacaattttgaagaaattgagttgtattcagaatatatacacatatagcagaacagaaattcaaaaaaatactcgattttgagtaatgaataccgaattaaattctagttcagtgtcactgcatattagagcctgagaatttatttttagaactgtagtacaagtttatttgttgaccaggtttttaattttcagaccccacgtatacctgactcagaaatgttgatggatgaaggcacatctgatgaaaaggggcacatggaagagaaattgtccctacttccaagaaagaaagcacatcttgggagttcagacaatgttgctactatgtcaaatgaagaacgatctgatggtggttttccaaactctgtgatagctgaattttccgaagaaccggtctctgagaatttgtctcctaatactacttcctcattggaagaccagggtgaggagggggtatctgagccccaggaaacatctactgctcttcctcagagttctttgatagaggttgaacttgaagacgtgccattttcacagaatgcaggacagaagaatcagtcagaggagcagtctgaagcatcttccgagcaactggatcagtttacacaatcggcagaaaaagctgtggatagcagctcagaggaaatagaagtggaagtgcctgtggtagacaggcggaatttaagaagaaaggccaaagggcataaaggacctgctaagaagaaagctaagctgacctgaaggaagaagaaagtggatgataaatcctcttctttgtaacatagttgttgtttttaaaatatggtaattaataaacagcatggggcacaggacaaaaatttccaaaatttcaatttgaacttacttactatgcagttttttgcttccctttagaacgtagaattcaccattgtttttaattttccaggctatttttggtaaatgcaattttttatttttattaaccatgtttcaattttgggaaaccagatcatattatattttctttatcaggtggtacatctgaccattatttcaaaaatataattaaaaagctgtgaaagtagtaggatttccattacttataaggatcacagaaatcttttatactaagggttttaatagtaaaacttggtgagggttctagaagttttaaatttcaaaactaatcaccaattttttaaaatgtaggcatgcctaaacaaaaataagtgtcaataaattagaaaaaatataacttcaagtaaatgagagcacaaaaacagaaacttacggtcaaaggttcatgaagatattttggttttggcctcttaatcctagatatagatgcagttttttcctttgacttcactatctatggaaaggtacacataaaatctgtttctgattcattctatcatctgatgttaacagtactgtcagggatttaactgtggcatgtggggactaattatttaaaatttcatttgaagtattagtttgctgtaattttttttgtctgcatatgtgcagacgcctagaagtttagactttcacctttaatcaggtaaaaatcacaactatactttggagacatggtttaatttggacttctggtcctgatcagatagataaattaagctggagattttacttttatcccaacccagttaacatctatatttcagaagtatgaggctccttcctaaggcatctccttaaatcttgccacctccctaattctacagtcttatttatattcccccacagctttcatctacttctgtaactcatggagtgattctccaatcaacagatcttcctgcctgccggcttatgcccttgatgtccatttttgggtaggtttggaggtgcaccccacaatgttagacctatatggcaggagtaaaactgcccccagtgttagacctatatggcaggggtaaactgcctttgggggagctgtggttacaagggcttcaatcatattggaggcttcaatcatcctttgatttgtactgagtactggttgcaagctggcctgttaagtatatattgtgttgccataacaaaggcctaggaaaatttgaagaaaaaaaacactgaactgttattttttgtaatttatttaaaaatggacaaaatggttattagaatccaaagataatctaaaaacagttctactctttggaaatattatgtgtactcaaatttgcacttaagttggagaatgttttgagaccatttaaattgttttaaaaatagcttgatcttgatccttatgcaaaagaaactaagactttgtgtcattatttgaggtagctaaggactgatgttgaaagtgtattcagtctatagtaagctgatgtcaggtcagtaaattttgtttggggatgttggtattttcgatcaagttaaaatcttaaagcagacaaaaatagtaaacgctcctatttgtgttagattttgaacaattgtattaccctatattttctttaattagtcaaaggtaagccagattatttcattctaaatgaaaattaaagcactttggccatttattttttcaacaaatgctaatactaagtaaaaaaaaaaaagtatgactactattagtgaatctaccaaacatttatgctgttttatacattttatgagaaacttctgtcaatatcacaaagggaaatactctgttaagattcagtaaattcttaatctttacatgtttcatttcttagatttgaaaacacttgtagatattttatttttacttggatttgtttaaaatactttcttttcaaattattttaaacatggaaacgcttcatgaatttgtgtcatccttgcacaggggccatgctaattttccctgtattgttctaattttagtatatgtgctgccgaagtgagcactaaaagactttctttagacaagtgtagttttttaaagattgagctcactggctcaactcttgatgtgtgaatatagttgagtttacaaaaaatgtttattaatcatatatgaccattgggggctaacagtataaacttattcttgttaaacttgtttgggttaaatagtaagtgaattgtaaacaatttagaagttttttgttcagcacacaagaacacttctgttacagattctctctgacagaaattgttattttggggtttatagattatagagggaaaagttagatcacttggaaaaacctaactctcatgttcagtaacttgagtatagaatttataccacaatttatcttcaataaggaacctacatgaacttaatcagttatctgtagtttttgcaaggcattagaaaaaatttcacaattacagaggactgaaaatgtgatttcaaccggctagtctagttgttgaatgtccagtcacattacacatagtcctttgtgaacttatttgtgaagggagttcactttttatgtacatacgtgtatatttccttgtgtaatataaagcagatggttattagtattttagttctttcaagtttaaattattcaattgctagacatcacagaaattagtatatttaagaatttattataaagctcctctacaacttttaaaggtgagagggtctattatgatttttttataaaatcaaacagcatgatttagaacgtcagtcttctacttaaaatgtgtctatattcatggtatttccattcagtgtagatggtaaggaaaacatctagtcattaaagatttacttatagcagactccagaacactacctacaatggggtttcagtgactagaaatcttgaaggtttatgattgcatcaaattgagcctgtactaatatctaaatatctgctcttatgttctgctttatcccttgggattaccttctaaggtttggtcacaccagcaaactgaaacagatcttaatgtacataaaaaatttatactaatattactcatctgtgttacagtattttgaaaaatgtttcaggtgtcatctagtcgtctttcatgggtgtgattagttacaaatgttatgcttatgttttcatacttaatatcaagctttctttgtaccttacaagatagtatttttggttctaaaaaaaacaagcaaacttcatttttgtagtatccagaaattacctggagtcagtatttttattcgccttctagaacttgtgatccacacatcacccatttatattagtggtaaaattatctgctaaaatctaattgtaagaaaggcttaccttctgtcatcaagtgattgtatcatcctggatcgtcatttccaaggaactagcctttcttttcctaagcgtctgtatgtgttctaaaacttccagtatatatttatagaacttagaaaaaatgttacattattcagagtagcaagtcttactggagtacctatgtttgttttcttggtttttatttttttttaagtttaaaagtagtaattaaacctatattttgtgattgtttcctggtctgtgtttttaaattcctttccttcagttttcctcatgaagatgtttcagatactgaatttgtttagacattgaatgactttgttaaaggcacaattaatcacattggttgtactctgaagacagacttctttaaaaaaaaaataaacaatttaaaacaa

SEQ ID NO: 715 - DNA, 17498 bp, Homo sapiens
gagatcgggaatcctctcagtccttagttacaaggctccatcctcactttgttcgctcctcagtcgtccaggcggattcctttttcgccaggtaaggctggcccgggtgcatggggcccggcgtgccctgggtaaggctggcccaggcgcgtggggtccggggcgcgccgggtaaggctgggccaggcgcgtggggtccggggtgccccgggtaaggctggtccaggggcgtggggtccggggtgccccgggtaaggctggtctaggcgcgtggggtccgcagcgccccaagtaaggctggtccaggagcgtgaggtccagggtgccccggataaggctggtccaggcgcgaagggcgcggggtgccccgggtaaggctggcccaggtacgtgaggcccgaggtgccccaggcaaggctgatccgggtgcgtgcgtggggcccgggtaggggcaggcagttggccccctcacttgactccctgctctttcccttactgtccgtggcgcaatgagaaaaaaactctcctaagacttatctatccccaaattggaaacatgaaagtagttctgtgaagaaaaaataaagtcaagaaaatgaggtggtgcttgacaagtcctagctttagaaaaaggatggaggggccgggagcagtggctcacgcctgtaatcccagcactttgggaagccgaggcgggcggatcacctgaggtcggagttcgagaccatcctgaccaacatggagaaacctcgtctctactaaaaatacaaaattagccaggcgtggtggcgcatgcctgtaatcctagctactcaggaggctgaggcaggagaatcgcttgaacccgagaggcagaggttgcactgagacgagatcgcgccattgcgctccagactgggcaacaggggcgaaactgtctcaaataaaaaaagatggagggccgggcgtgttattttccagcactttgggaggccgaggcgggggcggatcacgaggtcaggagatcgagaccatcctggccaacttgggaaaccccgtctctaccaaaaatacaaaattagccgggtgtgttggctcgcgcctgtagtcccagctactagggaggccgaggcaggagaatcgcttgaaccggggaggcggaggttgcagtgagccgagatcgggccactacactccagcctgggcggcagagcgaaactccgtctcaaaaaaaaaaaaaagtgtttaattatgtgactggaaaaattgatttggaagtaataacttttgcattttcttcaatttcctccgattgttaggcaaatcgaattcttgttcaaattgcaaaaggaaagcgtgccttccataataatagaccccaactctcacaaagaagaaaccattctctccggcccctccctggcctcctcagatccacctctgggtcctcccattccctgcagccctctcccgacttacaccccagactctgctaattgtgtgtgcctttttaagcaaacacatgcatagataagtgcttttttttcccagtcttcaatataaggtgattttctacattaaataaaccttaaactttggtgttatgaacttgacttgaattctaggcaccaaggcacagcttagagtagacccgagtcctgctctgcggagttcgtcttcccagcgaaggtacagaggcggatgaactgctgagacttggtaagtagtttagtggattaggggtaggattagtggcgggtaagtgtgcgggtggggttggggtggggtatttcattttttgagacggagtttcgctcttgtcgcccaggctggagtgcaatggtgccatctccgctcactgcaacctacgcctcctgggttcaagcgattctactccctcagcctcccaagtagctgggattacaggcgcctgccattatacccggctaatttttgtatttttagtagagacggggttttgccattcggccagggtggtctcgagctcctgacctcaggtgatccttccacctccatctcctaaagtgatgggattacaggcgtgagtcactgcgcctggactggggaggggtattttagagtgaaacaagggaaatgaccttgggtctgataaagaaatgagccctacttataatctagtgtgggtcaggacccttttgcagtctggtgctattagcagaacccacagttcgtcatcgctagaaaccacattttgtttcacataacagttgttgcaggttttgcattctcactacttcaagattaaaaggtagggccaggtgtggtggctcacacctgtaatcccagcactttgggaggttgaggaggccagatcacttaaggtcagcagttcgagaccagtctggccaacatggcgaaaccccatctctactaaaaagtaccaaaattagctgggcatggtggcacgctcctgtagtcccagctacgtgggaggctgaggcaggagaatcgcttgaacctgggaggtggaggttgcagtgagccgagatcctgccatttcactccagcctgggcaagagtgagacgccctctcaaaaaaaataaattatatatatatatatatatatatatatatatatatagtttagtcctgctactcaatcttgtttagtagtaggttaagaagctcatatattccaaattttttattatctaaaaaagttttttagagatggttttgctatgttgcacaggctggtctcaaattcctggcctcaagtgctcctgctgccccgaaaggtgctgggattacaggcttgagccaccgcacccagcccagcactttgggaggccgaggtgggcggatcacctgaggtctggagctggagaccagcctggccaacatggtgaagccccatccctaaaaatacaaaaattagctgggtgcagtggtgcacgcttgtagtcccagctactcgggaggctgaggcaggagaatcacttgaacctgggaagcgggggttgcagtgagctgagattgtgccacctgcacttcagcctgggcgacagtgagactctgtctcaaaaacagaagaaaacaaaacaaaacaaaacaaaaccctgtaaattacttgaatgcccactgctgagggaattacttattgaaccaaaatatgttcaaaatatggcatgtcacacatagaagagtgaggtgtgcatatataactggaagattacaaatggcctattgaaaaaaagaaaatagtgttaaaagtataaagctattaaaaaaaagtaaatgtccccatacccaaggagagagacgtactaactagaagtcgaagttggcattctcctttattgtcctcccatgcacccataaaaaccaggcactttatcttggtatggtagcatgcctgtaataccagctcctcaggagactgaggtgagaggatcacttggtccctggagtttgtgaccagcgaacagtgatcacaccactgcttgccacgctgggcgagagtgagatctcaaaaaaaaaagcaaaaacacaaaagtcacctgtacgttgtgagagataccacaccaaactttgggtggcctcagaggtcagataatagagactgaggtgagggactagtaattgttcttatttaaaaaaaaaaaaaagaagaaaagagaagtccataatccccccagcaaattcagaaaaacacacacaccgaccccccgccgccgccccaccccgccgataagaacaggctgccagtgttgaaaaggtaatacaccacaaaggaaatgcaagcagataaacatatgaaaagatggcagtcacaagccaaggcaatgcaaatcaacaagcttttttccatccctaaaattaaaggaagtttatccgccctcccaacccccagtcccttgagggaagtgctaaacatttcttgccctttccaaccggtgctctcctgtattgtatacttttaaagtaacctccttaaaatacaaagcagaacttgggagtacactggtgaaaatctccggtctccctaatcacttttttttttttggcagggtcttgctctgtcacccaggctggaatgcagtgatgcaatcatagcttagagtaaccttgaactcctgggctcaaataatctgaccgcctcagcctcccaagtagctgggactgcaggcagaagccaggacgtctggtccctgagcccttttgatggctaccatccaaccctgagacaaaatttgctaaacttgtaccagcctctgctttcttcttgatcagggattttgaacccagagtgcctgggtagtgtctggctagaattcagagtatctgatatcttggatgtgaaaaaggtcacatatatttattgtcattaaacgctaatcataatttagcatttagcatttgaggctgggagcagtggctcatgtttgtaatctcagcactttgggaggctgaggcaggtggatcacctgaggtcaggagtttgaaaccagcctggccaacatggtgaaaccccgtctctactaaaaatacaaaaattagccgggcatggtggcgtgtgcctgttgtcccagcaactcaggaggctgaggcgggagaatcgcttgaacccaggaggcagagtttgcagtgagccaagattgtgccactgcactccagcctaatccacagagtgagactcttgtatcaaaaaaaaaaaaaaatcagcatttgatacagttaacaacaaataataaatcccaccgtgcccggctgtaattttcagttttaagccaggcatggtggtgcgtgcttgtattcccagctactcaggaggctgagacaggagtttgagtgtagcctcggcaacatcgcaagaccctgtctcttttaaaaaaaataacttaatttcgagtttctcattgcacctgtcatgtactatagagtgactcttggaaaacacattacccaaaaaaggtagtgttagataatagggcactggccagattaattactgaaaaggtcaaaaaatccccagggtcactatgaatgtggccagggtggatatttgcccctgcactggctgtaatcagggtgttcaaacactggaatgtgttttgatttgcattctcctgactaatataatctttttgtgtttactgtacatatggtttttgtatatgtgtttacaaaattggattgtactctatattttctgcaccattttttccctctagtataccaaagacatccttaaccaatgggtatgattctaatatactcttattatgtatggtataatttttatatgtacgttgaacatattgtatgcaccatatagagtatatatatcataacatggtgtatatatatataacaatgtatattatggttatgattatttgagacggagtttcactcttgttgcccaggttggagtgcaatggcgtggtctcagctcactgcaacctccgcctcccgcattcaagcaattgtcttgcctcaacctcccgagtagctggtggagcccgccaccacgcctggctaatttttgtatttttagtagagacggggtttcaccatgttggccaggctggtcttgaacacctgacctcagatgatccgcctgccttggccttccaaagtgcaggaattacaggcgtgagccactgtgcctggccataatgtatattataatgtatattttataaattaatgtatttatgtacttatatatagttatatctattctatataatcccatcgtgtgcataaatcatcatttgttccacccttctcttattaaaggacattgttttctagtattttttggccagaaaaaactcagtactaaaatttctattcatgtattcctaagtgtacaggtggtttcattcctaatggtagattctcaaggggagagtatatgtattatttctgactttaataataggcttttcgtttcctgaaatgtttaataactattcctacttctgatgggtaaaagtggtctcattgtttttttattatgtactcaactcctgggattgggccacctttcacatgtttactattgatttacattgtctttcctaaaaatattttatttagttttagtttatttgttttattttatttttatttttactttttttttgagatggagtcttgctcgctctgttgcccaggctgtagtgcagtggcgttaaccctaattcaacctctgtctaccgaggtcaagtgattctcctgtctcagcctctggaatagctgggattacaggtgcccgccatcatgcccagctaatttttgtatttttagtagagacagggtttcaccatgttggccaggctggtctggaactgctgacctcaggtgatctgccctcctcaacttcccaaagtgctgggattacaggcataagccactgcaaccggcctcaagtacatttattgtagcgtttattggacacaataaaggcacaattgttatcagaaaaatttgtccttatgtgcctgtagaagtttacccttgttttcagctttctgtgtcatcttggcaagtcaagtagaagtctatttcaccagggagagctcagtggttttccttaaggattttcagtttaaaaaaaaatattagaagcattatcaggctagacccggtgccactgcactccaacctcggcgagtgagaccctgcttaaaaaaaaaaaaaaaaaaaaattagcatattcaaacatcaataaaagtaagaactcatcacctagattcaaaaacaaatattttcccccatttgtttaatctctcttttttctttcttagttgtttgctgtgttttaaagtaaatcccagacatcatgccatttcacctgtaaaaacttcagtatgtagctcttataaaataaggagactttcttaactaaatacagtattgttacagttaataaaatatatattcctcaatatttaataatcagtccatattcagtactccctgcattttacagttgattcattcaaatagagatccaaaatagggggagcgtacattgcatctagtgaattcccttagtctcctgaatgagagtgggcccctttattcctgttgaagtcctgtatagggtcctatggacctgtccggtggactatttggttgctttctcagtccttgattagattcagacactactggtgctgggtttttaaaatttacttaattaagagggatgaggctgggtgaggtggctcacgcctgtaatcccagcactttgggaggccgaggtgggtggatcacctgaggttgggagttcgagaccagcctgaccaacacggagaaaccttgtctctactaaaagtacaaaattagccaggcgtggtggcacatgcctgtaatcccagctacttgggaggcttaggcaggagaatcgcttgaacctgggaggtggaggttgcggtgagccgagatcatgccattgcattccagcctggacaacaagagtgaaacttcatctcaaaaaaaaaaaaaggctgagggtgaaatgtgtaattaatattgattccttctcttttttagtaatcatttacatgttttacatgtttcctcttttgacctttactctggtgtaatcaagattttctgtatacatttgtcccccttacctcctgttgctcatattttggaagttactttgtgataaatgagtgccgtgttttttaaacaattttttgtaactatcatgcttttttctttttcttttctttttttttttttttagctgttcatttaaaattttttattttttatttttttgagacagaggcttactctgtagcccagaggcgtgatctgggctcattgcaacttccacatccagggtttaattttttttttttttttttttttttgagacagagtcttgctcttttgctcttgtcgcccaggctggaggcaatggcacgatcccagctcactgcaacctccgcctcctggcttcaactgattctcctgcctcagcctcctgagcagctgggattacaggaacccaccaccacgcccagctaaatctgtatttgtagtagagacagggtttcaccatgttggccagggtagtcacgaactcctgacctcaggtgatctgcccacctcggcctcccaaagtgctgggattacaggcatgagccacctcacccagcctaatttgttttttaaaaaaactggagatgaggtctcactgcattgctgaggctggtctcaaactcctgggctcaagcaatccgctcactcacctcggccaccgaaagtgctgggattacaggtgtgagccactgcgcttggcctgttttaaatttttatggttacatagtagatgtatatatttatttccatacaggcatgcaatgtgtaataatcacatcagggtaaatgggggtatcctatgcactacctcaaacatttatcatttcttcttgttacaaacattccaattatactgtttaagtatacaataagctattgttgagtgtagttaccctgctgtgctatcaaatactagattatttttgtacccattaaccatccctattccctacatccacccacctactacccttcccaggctctggtaactatcattctactctcttttttttttgagacagggtctcactctgtcgcccggtacagtggcgtgatcttggctcactgcaacctccacctcccaggttcaagtgattcttatacctcagcctcctgagtagctgggactacaggtgcgtgccaccacgtctggctaatgttttttttcttttgagacggagtctcgctctgacgctcaggctggagtgcagtggcacgatctaggctcactgcaagctctgcctcccaggttcatgccattctcctgcctcagcctcccaagtagctgggactgcaggtgcctgccaccacacccagctaattttttgtttttatatttttagtagagaaagggtttcaccgtattagccaggatggtgtcttatctcctgaccttgtgatccacctgcctcggcctcccagagtgttgggattacaggtgtaagccaccacgcctggcctctgctaatttttgtatttttagtagagatggggtttcgccatctcggccaggccggtctcaaagtcctgacctcaggggatccacctgccttggcctcccaaggtgctgggattctagatgtgagtcgccgtgcctggccttttttcgctattctctagaagagtttgggcacagctaagataatagttgcttctaaattttctgatttaattatgaaagttgaatggtgctcccatttttgaaccatgctttatctgtagttgtgtccccttgttattcatagtattccttatttgtattttggttttgttaattctctataagtttctgtttttcatttctttgatttgcgcgcatctcttttggtttcttgggtagattttgcccttgatctggtaatttaactttaatttttattctttctagaaaattctaaaattttaagtctatacattttcctcaaagcaccactttagctacattccccaagttttgataggtagttatcattttgatttagtattttaagtttctccattagtttgactgaatagtcattttaaaatttaaataactttaacctttagtatttaaacattaaacatagaagtttttaagtttaatttatcttttacttttatgctatcctttttcctgattcaatttttattgcaatgaaaaatttctgaaattattttttagaaacagcgtctcactatgttgcccaggctgatgttgaacttctgggctcaagtaatcattccaccttaacctcccagagtgctaggattacaggtgtggcaccgtgccctgcttgaaattcttggttgggtgctgagcatatatcttttgccctgacaagaatgacattttagctgcttatgtgattcttattttgcaggggaggggacagggtctcacactgtcacccaggctggagtgcaatggtgcgatgtcagctcactgcatcctctgcctccctcaggctcaagtgatcctcttacctcagcctcccttattactgggactacagtgcacgccaccacaccaggctaatttttgttagagacagtttcaccatgttacccaggcaggtctcaatctcctgagctcaagtgattcacctgccttcaccagggaagccttttctagatctccctgtactctaaaaatcaatattcttggctgggtgcagtggctcaagcctgtaattccagcactttggaggccgaggcaggcggatcacgaggtcaggaattcgaggccagccaccaacatggtgaaacctcgtctccactaaaaatacaaaaaaaaattacctggcacctgtaatcccagctactcgggaggctgaggcgggagaattgcttaaagctgggaggcggaggttgcagtgagccgagatcgcgccattgcactccagcctgggtgacaagaacaagactgtcaaaagaaaaaaacaaaataaaaccaacgaaaactctctttctctctctctctctttctctctctctctctctctctctctctctatatatatatatatatatatatatatttttttttagacagtcttgctgtgttgcccagcctgcagttcagtggcttgaacttggctcactgaaacctctgcctcccaggttcaagcaattcttatgcctcagcctcctgagtagctggtattacaggcacgtgccaccatacctggctaatttttgtatttttgtagagacggggttttgccacgttggccaggctggtcttgaactcctgacctcaaatgatccacccacctcagcctcccaaagtgctgggattacaggcgtgagccactgtgcctgcctaacaatattattctgttgagacaaggtctcactctgtcacccaaggtgtggagtgcaggggcacaatcacagctcactgcagtcttaactttccaggctcaagtcatccttgcatctgaacctcccaagtagctgggaccacaggcgtgtgtcactatgcccagctaattttttatttttttgtagagacaggtcaccctatgttgcccaggctggtctcgaactcctggggtcaagtgatcctcccacctcaacctctcaaagtgctgggattgcaggtgtgagccaccatgcctggccaagaaagtcattttgaattgacttgataattggttttcagaaaaagtcttaatgttaacaatctctgcaattcaaaagggacaactatttctcaattttgcgtaagattctattcaagttagcttagatttggatgatttggtatgatacatatgttggtttcttaaagaataacatctattataattaatctcattatagagaacacagacaacaaagttaatagtatggcaaatcagacagcttcattcttagttatctgctctttggttaatttattgcattcaaatcactatgtaaagggaattttcatgataatttataaattttgaattctaattttctaatcttacccattttgctagtgaactttttattaatttattatggagtgcacccagcatagttttcttaactaagctcatattcttaccaagtttctcaagagaattctttagtaagtaatttttcatttttttgtatttcagattgacgtattttaagatttttttaacttctgaagtctagcaggcctgtaagaacaaaaatcattctgtaggaattaaaaacagaatccagtcttgacaacatatccacaatgtctgatgtatctactagtgtacaatcaaaatttgctagacttgcaaagaaaaaggaaaatatcacctatatgaaaagagagcagttaacagaaactgataaggacatagctccggtattagatttaaaatgcaaggacgtatcagcaattatgaataagtttaaggtcttaatggaaattcaagacctgatgtttgaggagatgagggaaactcttaaaaatgacctaaaagcagttttagggggaaaagctacaatacctgaggtaaagaattcagagaactccagtagtaggacagagtttcagcaaataatcaatttagcattacaaaaaacagggatggtagggaaaatagaaggagaaaactctaaaataggtgatgataatgaaaatttaacctttaaattagaagtaaatgagctgagtggtaaattagacaacactaacgaatacaatagtaatgatggtaagaaattaccccagggtgaatcacgaagttacgaagtcatgggaagtatggaagaaaccttatgcaatatagatgacagagatggaaatcgcaatgtccatttagaatttacagaaagagagagtaggaaggatggagaggatgaatttgtcaaagaaatgagagaggaaagaaaatttcagaaattgaagaataaagaggaggttttaaaagcctccagagaagaaaaagtgttgatggatgaaggagcagtacttaccctggtagccgacctttcatcagcaacactggatattagtaagcaatggagtaatgtcttcaacattctgagagaaaatgattttgaacctaaatttctgtgtgaagttaaattagcatttaaatgtgatggtgaaataaagacattttcagatctgcaaagccttagaaaatttgccagccaaaaatcttctgtgaaagaattactgaaagatgtactcccacaaaaggaagaaataaatcaaggaggaagaaaatatggaattcaagaaaaaagggtaagcatacaaatgtataaatgtataaagcttatgtataaatgtaatagtaggcatggttattttgaaggataaatcaattttttttttcttgagatggagtttcgctcttgtcggccaggtgggagtgcagtggcacgatctcggctcgctacaacctctgcctcccaggttcaagtgattctcctgccttggcctcccaagtagctgggattacaggcatgcaccaccacgcccagataattttgtattttcagtagagacggggtttctccatgttggtcaggctggtctcaaactcccgacctcaggtgatccacctcggctacccaaagtgctgggattacaggcgtgagccactgggcccagccggttaaatcaaattttaaaaaatgattccttaaaagtaaaagcatgatattaaaagtaatgatttaaagggcactttttttttctgtgaaggttttattatgggcagagggcaagggggccttagtccttcttggcagctggtttcatcatggtggccaagacggcactcagctcctctccctgttggtgtgaatgtgtgacctcacccttttcttgatgaacttgagggcctgtttgtcctttgagaccttgaacaactccgtggtgtgatactctacgtggcgaagcaacacacctctcagatcatgtcccacactaacttagtgtgtttggtcaggtgcctgaaacagcggcagtgcctgggcttttgctcatgttcttgatcaccttgttgcccttgttgagacccaaagccttggggtcacacagagcagtggctgctgttctccaatggctgctgtgctggaaggggcttttttttttttttttgagataaagtcttgctctattgccctggtgggggtgcagtggctcaatctgggctcactgcaccctccacctcccaggctcaagtaatcctcctactccagcctcctgatagctgggaccacatgcatgcactaccacacccagctaatttttgtactttttatagagacgaggttttgccatgttgcccatgctggtctcgaactcctgggctcaagcagtctacatgccttggcctcccaaagtgctggaattacaggtgtgagccaccatgcccagccaaggtctatattcgtaagccaatatttttttacatgttttcaaatgaacgcttctcctctgcctttccaacatttccaagtgtaacctctgcaaagtgagaatccataaggaaaaggtacacttgaatcaacaaattatttaagaatcagtatttaatctcagaaattagctgccttccagtgtttcacagatgaggcacctaacctgtctggtgggtttgggaaggttgaaaagctcagtggcagactaagggcttcaaggaatattaggagccaacatttatattgcagacatcatcagaagctcaataccttgcttactttatattacaaaaatcctggagtgatgctgccattagaccctgctttataaggaaaattgaggcactagtagcaaatgtggcaatcgggccagggtttgaatagttttgaactgagcttgttgtattcctaaccaaagcctgcttgtctttaaagtcctaaggctagagtgtaaactgcaattggggtctttttttttttttttttaattgggtttgttgtctgtggagaaaggtaaatgtgagcctggggtttttgtttgtgtgtgcttatgatcttcctaaagcagattgtaaactttagccagattacaatgcctatttaccataggactctcacatacaataagcagacaattgattaaaataggtaattactgaggatcaatcacatacacagcagtaagtgttcagggatctagaaggaagaaagtagacattatgacctcagaatttgtttcaagattacacaagaaatgacaaatatcttgagatgatcatagggagacttgacttgtttggggacctaggccttcaagaacaattaatatttaagcactttttcagatattttctgtcagaattgaagccatattaaaattagtgaaattgaaattttaattctttaaaagacaaatgatttaaacaaataactcttttttttcttctttgtttaactttcaggataaaaccctaatagactcaaagcatagagctggagaaataaccagtgatggcttgagcttcctatttcttaaagaagtaaaagttgctaagccagaggagatgaaaaacttagagactcaagaggaagagttttccgagctagaggagctggatgaagaggcctcagggatggaggatgatgaagatacctcagggctggaggaggaggaggaagagccctcagggctggaggaggaagaagaagaagaggcttcagggttggaggaggatgaggcctcagggctagaggaggaagaggaacagacttcagaacaggactcaacctttcagggtcatactttggtagatgcaaagcatgaagttgagataaccagtgatggcatggaaactactttcattgactctgtagaggattctgaatcagaggaggaagaagaaggaaagagctctgaaacaggaaaggtaaagactacctccctgactgagaaaaaagcctcacgtagacaaaaagaaattccctttagttatttggttggggactctgggaagaaaaagttggtgaaacaccaggtggtgcacaaaacccaggaggaagaggaaacagctgtgcccacaagtcaaggaactggcacaccctgtctgaccttatgtttggcctctccctcaaagtcactagagatgagtcatgatgagcataaaaagcattcacatacaaatttgagtatttcaacaggagtcaccaaacttaagaaaacagaagaaaagaaacacagaactctgcacacagaagaactaacatccaaagaagcagacttaacagaggaaacagaagaaaacttgagaagtagtgtgattaatagcatcagagagataaaagaggagattggaaatttgaaaagttcccattcaggtgtcttggaaattgaaaattcagtagatgatctgagtagcagaatggacatacttgaagaaagaatagacagtctagaagatcaaattgaagaattctctaaggatacaatgcaaatgaccaaacagataattagtaaagaaaggcaaagagatatagaggagagatctagaagttgcaacattcgtttgataggaattccagaaaaggagagttatgagaatagggcagaggacataattaaagaaataattgatgaaaactttgcagaactaaagaaaggttcaagtcttgagattgtcagtgcttgtcgagtacctagtaaaattgatgaaaagagactgactcctagacacatcttggtgaaattttggaattctagtgataaagagaaaataataagggcttctagagagagaagagaaattacctaccaaggaacaagaatcaggttgacagcagacttatcactggacacactggatgctagaagtaaatggagcaatgtcttcaaagttctgctggaaaaaggctttaatcctagaatcctatatccagccaaaatggcatttgattttaggggtaaaacaaaggtatttcttagtattgaagaatttagagattatgttttgcatatgcccaccttgagagaattactggggaataatataccttagcacgccagggtgactacaaacaatatgctttcctcccccagcatgcatccaaaaatcaacaagtaaaacgaaaatacacttctacccagaaggatggacagctaatagcgtacttggggatgaggagcaaggaatattacagatattacctagatgttaataaagggtatgtttaaaaaaaataggctggtctcaatgtagtgagttatttcagttgatcacagtcagttacagatagaattccttgttttacttcccccccaccacctccctactgcagttgactagtctttttagaatttatattatctggctgggcacggtggctcacacctgtaatcccagcactttgggaggccgaggcgggtggatcacgaggtcaggagatcgagaccatcctggctaacacagtgaaaccccgtctctactaaaaataaaaaaaattagccgggcatggtggcgggcgcctgtagtcccagctacttgggaggctgaggcaggagaatggcgtgaacccaggaggcggagcttgcagtgagccgagatcacaccactgcactccagccggagccacagagcgacactccgtctcaaaaaaaagtatattgtgctagcttgtctaagaataaacttctatactgttgggggagggctgcacctgtcaagataacctgtcaatgtagtaggaaaacaggaggggacagtaacagaaaagcacgggaaaagatggcaaggttagttaaaatagaaaagtgctcagttcctcatacctgtaatcccagcagtttagggggccaaggcaggtgggtcacttgagcccaagagttcaaggccatcctgggcaatgtggcgaaagtgtctacaaaaaaatacaaaaagaggaagaaatgatatttcacaagtttgtatcatttgtcatgatgtgactcgaatatattaaatctttttcctttgaa

SEQ ID NO: 716 - DNA, 4000 bp, Homo sapiens
cggccgcttttttctcaagatggcagattcccactgaggctgagggggccgagctcgcgcgccgcgttcccttctccgttgccatgaaccgcggacaccccggccccgatggcccccgtgtacgaaggtatggcctcacatgtgcaagttttctcccctcacacccttcaatcaagtgccttctgtagtgtgaagaaactaaaagtagagccaagttccaactgggacatgactgggtacggctcccacagcaaagtgtacagccagagcaagaacataccaccttctcagccagcctccacaaccgtcagcacctccttgccggtcccaaacccaagcctaccttacgagcagaccatcgtcttcccaggaagcaccgggcacatcgtggtcacctcagcaagcagcacttctgtcaccgggcaagtcctcggcggaccacacaacctaatgcgtcgaagcactgtgagcctccttgatacctaccaaaaatgtggactcaagcgtaagagcgaggagatcgagaacacaagcagcgtgcagatcatcgaggagcatccacccatgattcagaataatgcaagcggggccactgtcgccactgccaccacgtctactgccacctccaaaaacagcggctccaacagcgagggcgactatcagctggtgcagcatgaggtgctgtgctccatgaccaacacctacgaggtcttagagttcttgggccgagggacgtttggacaagtggtcaagtgctggaaacggggcaccaatgagatcgtagccatcaagatcctgaagaaccgcccatcctatgcccgacaaggtcagattgaagtgagcatcctggcccggttgagcacggagagtgccgatgactataacttcgtccgggcctacgaatgcttccagcacaagaaccacacgtgcttggtcttcgagatgttggagcagaacctctatgactttctgaagcaaaacaagtttagccccttgcccctcaaatacattcgcccagttctccagcaggtagccacagccctgatgaaactcaaaagcctaggtcttatccacgctgacctcaaaccagaaaacatcatgctggtggatccatctagacaaccatacagagtcaaggtcatcgactttggttcagccagccacgtctccaaggctgtgtgctccacctacttgcagtccagatattacagggcccctgagatcatccttggtttaccattttgtgaggcaattgacatgtggtccctgggctgtgttattgcagaattgttcctgggttggccgttatatccaggagcttcggagtatgatcagattcggtatatttcacaaacacagggtttgcctgctgaatatttattaagcgccgggacaaagacaactaggtttttcaaccgtgacacggactcaccatatcctttgtggagactgaagacaccagatgaccatgaagcagagacagggattaagtcaaaagaagcaagaaagtacattttcaactgtttagatgatatggcccaggtgaacatgacgacagatttggaagggagcgacatgttggtagaaaaggctgaccggcgggagttcattgacctgttgaagaagatgctgaccattgatgctgacaagagaatcactccaatcgaaaccctgaaccatccctttgtcaccatgacacacttactcgattttccccacagcacacacgtcaaatcatgtttccagaacatggagatctgcaagcgtcgggtgaatatgtatgacacggtgaaccagagcaaaacccctttcatcacgcacgtggcccccagcacgtccaccaacctgaccatgacctttaacaaccagctgaccactgtccacaaccaggctccctcctctaccagtgccactatttccttagccaatcccgaagtctccatactaaactacccatctacactctaccagccctcagcggcatccatggctgcagtggcccagcggagcatgcccctgcagacaggaacagcccagatttgtgcccggcctgacccgttccagcaagctctcatcgtgtgtccccccggcttccaaggcttgcaggcctctccctctaagcacgctggctactcggtgcgaatggaaaatgcagttcccatcgtcactcaagccccaggagctcagcctcttcagatccaaccaggtctgcttgcccagcaggcttggccaagtgggacccagcagatcctgcttcccccagcatggcagcaactgactggagtggccacccacacatcagtgcagcatgccaccgtgattcccgagaccatggcaggcacccagcagctggcggactggagaaatacgcatgctcacggaagccattataatcccatcatgcagcagcctgcactattgaccggtcatgtgacccttccagcagcacagcccttaaatgtgggtgtggcccacgtgatgcggcagcagccaaccagcaccacctcctcccggaagagtaagcagcaccagtcatctgtgagaaatgtctccacctgtgaggtgtcctcctctcaggccatcagctccccacagcgatccaagcgtgtcaaggagaacacacctccccgctgtgccatggtgcacagtagcccggcctgcagcacctcggtcacctgtgggtggggcgacgtggcctccagcaccacccgggaacggcagcggcagacaattgtcattcccgacactcccagccccacggtcagcgtcatcaccatcagcagtgacacggacgaggaggaggaacagaaacacgcccccaccagcactgtctccaagcaaagaaaaaacgtcatcagctgtgtcacagtccacgactccccctactccgactcctccagcaacaccagcccctactccgtgcagcagcgtgctgggcacaacaatgccaatgcctttgacaccaaggggagcctggagaatcactgcacggggaacccccgaaccatcatcgtgccacccctgaaaacccaggccagcgaagtattggtggagtgtgatagcctggtgccagtcaacaccagtcaccactcgtcctcctacaagtccaagtcctccagcaacgtgacctccaccagcggtcactcttcagggagctcatctggagccatcacctaccggcagcagcggccgggcccccacttccagcagcagcagccactcaatctcagccaggctcagcagcacatcaccacggaccgcactgggagccaccgaaggcagcaggcctacatcactcccaccatggcccaggctccgtactccttcccgcacaacagccccagccacggcactgtgcacccgcatctggctgcagccgctgccgctgcccacctccccacccagccccacctctacacctacactgcgccggcggccctgggctccaccggcaccgtggcccacctggtggcctcgcaaggctctgcgcgccacaccgtgcagcacactgcctacccagccagcatcgtccaccaggtccccgtgagcatgggcccccgggtcctgccctcgcccaccatccacccgagtcagtatccagcccaatttgcccaccagacctacatcagcgcctcgccagcctccaccgtctacactggatacccactgagccccgccaaggtcaaccagtacccttacatataaacactggaggggagggagggagggagggagggagagaatggcccgagggaggagggagagaaggagggaggcgctcctgggaccgtgggcgctggccttttatactgaagatgccgcacacaaacaatgcaaacggggcaggggcggggggggggggggcagagggcagggggacgggtcgggacaccagtgaaacttgaaccgggaagtgggaggacgtagagcagagaagagaacatttttaaaaggaagggattaaagagggtgggaaatctatggtttttattttaaaaaa

SEQ ID NO: 717 - DNA, 9514 bp, Homo sapiens
attctggggctcgggggatcccggacaccctctcagctcctgcccgggggcccatgtggtcagtgtttctgtaaggggtagtggggagggtgtgaaggggccaggggggctcaggcgggcaggaagaggggagggtggaggtgtcacctggggtgccaggaatccactctggcgtgaggactccggaccctctgtctcgtgtggcctcggaccagtggcttgacccctcagagcctgtggagcacggagcgtgcagggcttgaaggcgaccatgagggcaccgtgcagggttaggacactgagcccagccccagccatgagaggccagaagcttcggcgcacaggcctggaggaggagaactccacctacccctcacgacagccacttcctcgccccgaccctacccagtggcctctccctagagctgggggcttctggggggccaatgaaaagagcagggcaagtgtcgagtctcacctcaccccctctgtcgggcaccagggccccccaggaactcccagctgcccctcacagccccgccttagcctcagtcactaaggccctgtccagccccgccctgagaagccgacttgtctctggggcaggcaggggtgtccccaggacacagtgaggagagccttttccttcagaacctgctgtcaggcagggagggaggtgctccctggggaacacccgggttctgagcctcaaggggtggccttaggaactttgcctgagggagatcttaggggaggagccaagccagggcagcctgggctagggaggcaggttccagacaccccgacaccaagggccgagcccccgcccccagcccccagcttctctcccacaccctagccctgcccctgccctgcccctacccccacggcacccatgagccgctctccagtcccttctgccctgtgcctcggtgcctgtgacctgagccccctggttgacccctgcactcagtccaacttgggccaaacgactgcccctccttctggcagtgggctggaccagccggccagcgggagcccccttggcagaagccggtcgtaaaggatcataaactgggcggcgtctggctggggcgaaggtcgctgaggtaggaactgcgccagtcctagacgccagacccgctcagaccctcctgccaggtgacagccgccaagatggggtcttgggccctgctgtggcctcccctgctgttcaccgggctgctcgtccgacccccggggaccatggcccaggcccagtgtatgtgcgggcaggggtaggtggggcacgggcggcggggagccaggggctgggaggcactgatccctcctctgcaaccttacagactgctctgtgaacaaggacatctttgaagtagaggagaacacaaatgtcaccgagccgctggtggacatccacgtcccggagggccaggaggtgaccctcggagccttgtccaccccctttgcatttcggatccagggaaaccagctgtttctcaacgtgactcctgattacgaggtgtgggcggcaggcgggcgggatatgggggtcccgggagaagggcacctgcatcctcaggccacacctcccttgggggcctaggagttctatgcctgcgggcatccactgacacccatgcttggtggtgcctgccctagaaggctgggccatttcgggatgaagctgcctgggcccacaccctcagcactgaccactgatgatggggaccctgggccagcgcctgcccacttggcctcagtctccccacctgtggggcaggacggtgactgcagacctgtctacatccacaggagaagtcactgcttgaggctcagctgctgtgtcagagcggaggcacattggtgagtccccgccccgctctccccgccccacccggccacctctgctgggctctgccctgccggtccaggaccagtctttgatgacgtcagctagggtgtggtttcaaattccacccccccgagggtgatgcccacatttcctccagtccagactctgccctgagctgtggagtccccgtcactgaccccttgtccagcagacaccccatccagtgtgcccaagactcccacccactccctcaaccatccacaagggaggcacctttatcctgccagtcacggggaccaccttggttcccactcgccctccctccccacgtgtcccccacagccccccactggtaaatctgttggctgtgccccagctcgacccagaaatccagagtctgtccacctccagtcccatcagggccgggacaccagcactcattttgggaaacttccagctggcccaccggcttccctgttgccctttgctggccccagtccactccacgtggcagaacagcccctgtggatgttgtaaaccaaggctgcccagcccaccccagccctccacggctcctttctcaccgagtcaaacccagacatactgtgcagaggctccactgcagcctcagggctcccgccaggcacgcccctccctcaccggctcaggactgcagtcttcagagaaatcccaaccaccctatgccctgttgcatcccagccccgctcccccaacatcctgcttcttgaccggcggcatttttttcggctttattaaggaaaattgcagaatcctgaggccagcacaggccccctcacctaccagcacacagcaggctctgtgccctccatgcaccacggcacgtcacctgcacatatcttgggatatgtctctgaaagagagagactcttttttgagacagagtctcactctgtcacccaggctggcgtgcagtggagcgatctcggctcactgcaacttccgcctcccgggtccaagcgattctcctgcctcagcctcttgagtagctgggattacaagcatgcgccaccacggccggctaatttttgtatttttagtagcgacggggtttctccatgttggtcaggctggtctcaaactcctgacctcaggtgatctgcccgcctcggcctcccaaagtgctgggattacaggtgtgagccaccgtgcccggctgacaatccagtttcttcacaaataaatctccaggaaaaaagatgggagaaagggaaaggtacagatgaacagaaactcaggagaattaccaaccaggtccataatgtgggccctgattcaaacaaacaattgttaaaaaacccttcagagaccacggggaatgtggcatcctggacatttgaggtagaaagtgaccgcttttcccaggtgtgacaacgacattgtggttatgttctaaaaagaagagtcctggctgggcgccgtggctcacacctggaatcccagcactttgggaggccgaggcgggtagatcacctgaggtcaagagttcgagaccaatgtggccaaaatggtgaaaccccgtctctactaaaaatacaaaaattagctgggcatggtggcaggcacctgtaatcccagcactttgggaggccgaggtgggcagaggccgaggcaggagaatcgcttgaacctgggaggcagaggttgcagtgagccgagatcacaccactgtactccagcctgggtgacgacagagcgagactgtatccaaaaaaacccaaaaaccaaaaaacaaaaacaaaaaccaaaaaaaaaaaaaaacagagaaaagaaaatggattgtctttcctcacctgagattctgctggctgcatccccaagtacctgcattatttttctgtggagcacctgccacctcctggctttataaagtcctttttgtctgttgttataagtcctgccaggacaggcaccaccaggcagagatttgtctcttgtgatctctgaatcccaacgcctagagctgtgcagcccctgtagccccccaacaactgaatgagcgagtggacggatggccgtcgaggggtgcaccccactcacggcggggacgggtggccgttgaggggtgcacctcactcacggcggggacgggtggccgttgaggggtgcacctcactcacagcagggacgggtggccgtcgaggggtgcacctcacttagggcggggacaggtggccgttgaggggtgcacctcactcacggtggggacggatagccgtcgaggggtgcacctcacaacggggaggggctgtgggagaggctgacggccacatcctgcaggtgacccagctaagggtgttcgtgtcagtgctggacgtcaatgacaatgcccccgaattcccctttaagaccaaggagataagggtggaggaggtgaggccagcgaagccgcggggactgggcacgggggtgtgggagcccagggtgagggcaggaggtgagtggtggccgggggctcaaccacagtgggggtccacaggggccaagagtgtggccggaccaagcccctctccctccccaggacacgaaagtgaactccaccgtcatccccgagacgcaactgcaggctgaggaccgcgacaaggacgacattctgttctacaccctccaggaaatgacagcagtcagtgccgcccaccctgccccagcacgagcccctcgcctctgacacccacagccgccctcgccctccaaggctcttaggctctgtcctccctgaccctccccagggtgccagtgactacttctccctggtgagtgtaaaccgtcccgccctgaggctggaccggcccctggacttctacgagcggccgaacatgaccttctggctgctggtgcgggtgagcaggtcaccccagccccgagtcccacacacttgaggccccccggccccagctgctcccaggcctgatccagcacagccgtctgttgcaggacactccgggggagaatgtggaacccagccacactgccaccgccacactagtgctgaacgtggtgcccgccgacctgcggcccccgtggttcctgccctgcaccttctcagatggctacgtctgcattcaagctcagtaccacggggctgtccccacggggcacatactggtaatggggagggaggggcagtgcacggggcagggccttctaggcaggctggacacagggacggccaggatcaggagaggaagggcggggtcggggtcagggggtggggccgatttcggtcgtgattttgaaacaaatgcagactctccttgtaaaccaacccttcccatcttgagcggtgagggagcaaaccctgaacacacagggaggagcgtgggccccagagccaggcggtctcaggggcctggggaggtgggctggggccctggagctcttaagggatgctgacatctctgccctgctcacagtcaccactgggcccacacaggctgtctgcaaaccttcctggcaccaaggcacctggggccaccaaacagtacatgggaggcagaaatgcagaccccgggagcccccacttcctaaatgtttgcttacccgtcaagacaagccttgtgcaaatgggactcagtatctttgggccactggactcattcattagtaagggacccacaggggtgttactgattgtgatgctgggacaagggactgtcctaggcaggcagggacgcccggccaccagcgggactgggcccctcctcagccaaccctgcccttgatggggagtcagaggggccaggctggggccatccaccccagccccacgacgtgccctcccttccgccatccctgaagccatctcccctcgtcctgcgtcccggacccatctacgctgaggacggagaccgcggcatcaaccagcccatcatctacagcatctttaggggtgagtggggcccagccctcaacaatgccctgtaccccctctgtccctgtctccatccccaccttgggcagagctggctgggtccctgggcctcagggggccggggctgagcacttccatcatcctcccaggaaacgtgaatggtacattcatcatccacccagactcgggcaacctcaccgtggccaggagtgtccccagccccatgaccttccttctgctggtgaaggtgaggtgggcacctgcatggggggcagggcagagggggaagggtggaaggtagggcggggggtcagggctggggggccggggcagggcccccgccaagtctgcacctgcctttcctgagccccagccttcagcgccagctccaccttcaaccccactagtcactgctgcctcccccgcctccagggccaacaggccgaccttgcccgctactcagtgacccaggtcaccgtggaggctgtggctgcggccgggagcccgccccgcttcccccagagactgtatcgtggcaccgtggcgcgtggcgctggagcgggcgttgtggtcaaggatgcagctgccccttctcagcctctgaggatccaggctcaggacccggagttctcggtagagagtgcatccaaggcctcccctctgtgggtgggtcagggctgtacgtgggaggcagcctggccggggactcaatgagaccctgtccaggacctcaactcggccatcacatatcgaattaccaaccactcacacttccggatggagggagaggttgtgctgaccaccaccacactggcacaggcgggagccttctacgcagaggtgcggggcagggcaggcgggcatctccaagggtgtggggcttaaagatgtgtctaggagggacaagccccttcctgccccaggttgaggcccacaacacggtgacctctggcaccgcaaccacagtcattgagatacaagtttccgaacaggagcccccctccacaggtaagcccccctccacaggtgagcccccagggttctccaaataagccccttcggtggctcctttcccgcggtaggtgtgcaaggggcgggcagaggcaagcccaagcactgttcccggcccccagatgtccccccatccccagaggctggaggaacaactgggccctggaccagcaccacttccgaggtccccagaccccctgagccctcccagggaccctccacgaccagctctgggggaggcacaggccctcatccaccctctggcacaactctgaggccaccaacctcgtccacacccggggggcccccgggtgcagaaaacagcacctcccaccaaccagccactcccggtggggacacagcacagaccccaaagccaggaacctctcagccgatgccccccggtgtgggaaccagcacctcccaccaaccagccacacccagtgggggcacagcacagaccccagagccaggaacctctcagccgatgccccccagtatgggaaccagcacctcccaccaaccagccacacccggtgggggcacagcacagaccccagaggcaggaacctctcagccgatgccccccggtatgggaaccagcacctcccaccaaccaaccacacccggtgggggcacagcacagaccccagagccaggaacctctcagccgatgcccctcagcaagagcaccccatcttcaggtagcacccactctgttgccttccctccctgactccggtcattggctggtatgggaaacgctgtaggaagggtccaccccaggctgacctggcctgaccatgaaatcccaaagaggagtctgtttgggactgacagacacagacaggcccaaggcccccagtgaggtaacctgtgatgtgtgtaggacagaggccagatgtggggtccagcgaatcccacgattcccacggctgccgctcaccctgcaagtccctgcacctcttgtgagctcctgtgagcagcttggcctcccgggggggagggggtgggcagggtctcgatgggacacacaggccccttgagccagggtcagcagagcctgagatttgggagacagcccaggcctgggtggaacccaagtgtcccaagcctggcacaggttggcatgggaaatgcctggggcactcaacagtgcggggatgatgacgttttccactgcgatgccaggtggcggcccctcggaggacaagcgcttctcggtggtggatatggcggccctgggcggggtgctgggtgcgctgctgctgctggctctccttggcctcgccgtccttgtccacaagcactatggcccccggctcaagtgctgctgtggcaaagctccggtgaggcccaggatggagaacagggcaggcgaccaggcaggaagtgggggacgggggacaggagaggggagggcagagggacagatgtggagacggaggggtgtccagcgtggaatgagggtgtgcagggccaaggctgcagagacccagggaccccgctgacgcctcgactcccgcctgcaggagccccagccccaaggctttgacaaccaggcgttcctccctgaccacaaggccaactgggcgcccgtccccagccccacgcacgaccccaagcccgcggaggcaccgatgcccgcagagcccgcaccccccggccctgcctccccaggcggtgcccctgagccccccgcagcggcccgagctggcggaagccccacggcggtgaggtccatcctgaccaaggagcggcggccggagggcgggtacaaggctgtctggtttggcgaggacatcgggacggaggcagacgtggtcgttctcaacgcgcccaccctggacgtggatggcgccagtgactccggcagcggcgatgagggcgagggcgcggggaggggtgggggtccctacgatgcgcccggtggtgatgactcctacatctaagtggcccctccaccctctcccccagccgcacgggcactggaggtctcgctcccccagcctccgacccgaggcagaataaagcaaggctcccgaaacccaggccatggcgtggggcaggcgcgcgggtccatgggggtcccattcactcagtcccctgtcgtcattagcgcttgagcccaggtgtgcagatgaggcggtgggtctggccacgctgtccccaccccaaggctgcagcacttcccgtaaaccacctgcagtgcccgccgccttcccgaggctctgtgccagctagtctgggaagttcctctcccgctctaaccacagcccgaggggggctcccctcccccgacctgcaccggagatctcaggcacccggctcatctcagacctcccgctcccgaccctacacagagattgcctggggaggctgaggagccgatgcaaacccccaaggcgacgcacttgggagccggtggtctcaaacacctgccgggggtcctagtccccttctgaaatctacatgcttgggttggagcgcagcagtaaacaccctgcccagtgacctggactgaggcgcgctgggggtgggtgcgccgtgtggcctgagcaggagccagaccaggaggcctaggggtgagagacacattcccctcgctgctcccaaagccagagcccaggctgggcgcccatgcccagaaccatcaagggatcccttgcggcttgtcagcactttccctaatggaaatacaccattaattcctttccaaatgttttaattgtgagagt

SEQ ID NO: 718 - DNA, 4924 bp, Homo sapiens
gctaaagtcaacagtcgcttggtttgagctcaaataaatgcggggatgcctcggctcggagcagtcggcctcctccctccgcgagctggacgctccgcagcccgcccgccagccggcccgccggccgccgcaggaatccctggataaagaccagctcaaccatcgctgagaaaacagacctaggcttcccagggcggttaacccgccggcctctgggcagagactacaaaacaaaataaaacaacaacaaaaaactcccagtgtgtttcctactcttctttgtcttggaggaaagcaaagggagagaaatggacttcaccagtggtctttggcttcatcaattcacaggaaatggcatcaagatggttcaactaagacatgatcactaaaaacattataataatacctttttgaaaaactcagtttctcctgtttactaaatatttatttcatcaacatgggctgcgttccactgtgtcaggattctgcatgtgggtggagcactgttccagcctgagaagatggttctgaggccacttagcaagacattttccagcatgagcaggtttctctgtggaaatagtgacacctgttctggtgtgttgtctttcctcagggaacttaaggggtacaaagctcctgaaaatgttctttatgctggttgaagctcttatgtcgctgtactgattccctacgatgcagatttgaatcacagagtaattaaaatatggatcaaataaggctggggctcaccaaggctgaaagctgtagccattcaaggcatcatttctgtcatgaaaatataggaccttttcaaaacatgccttcaggaaggtgttctcttttcaaacaaaagtctaatgactgcataactcttcttgaccacatcttacactttctctagacttgcttatttacagctactggaacaaaaagatgaaatgaataaagcacactgattgtcctaagagtcttctgtgactaaaagcacatgagcttctccccaggctgagctttgaccctcccaagcatttccccaaaggccatgacactgcatcagattgctcctggacactttcctcagagttttcaacaaatataaactgaggagtggagcacagcaccagatttgctaatcaagaggcaatggtcccagtccaaatgggtgctgtgtgtgaatacagagcccaggagaagggaaggaggtctgtgaacatcaggaattgcaaaatcttgctgaaccaatagaccaacagccattaacatttgtcaatgcaaagatcctaaaatatacaagtgtggagttgtcctgccctaagagctgaagctgtgacaatcacgctgccatggtagatatttaagctcccctgaggttactgaatctaacaatgaataaacaatgaagagtagctaatttttggaaatctctttctatgaccggaaaatattcacaaactcagagtgattgtttggggtgaaagatggtcccatgccttgtgggcctctctttgctatctatacaacgttggaaatgaacccctcccttacaggaaagtgaacagcaaccaaggtgagcccaccctgggagggcagagtgggtgtactttcctcgaagagccctgaacacaacagggcacacaaacagccacagcaccctcaacaatgccccaccatctgcccaccagggcacacagattcacgcagattcagtgacacattccaaaaaaagggaattaaggaggacccatggcatggctaatggggagagagctttactacttttagcaccattgctaattattggagcaaagaaaggcatacaaggaatggaacccaacctgtttaaagtaataaatgtcaaccctaaagtgcatggaaccatctctccttcccttttgaggactgtgtgcttcacaagctgggcgtttgctgcatggggttttctaatgtaatgtgaattttcaatgtgctttgtctctgtagagtggctttaaaaagcccttgaagtcctcagctttaaatccatgctaataggggaagtcttttttttttttttttggaggtgaggagctttggttgggagaaacattgacccagactgcactctgggtaaactagggcaaaagacctgatatcgtctgcagggtacttattaaccactgttcatttgcaggatcaatatttccagcaaaggagtccacactcaagatacactgctacgtctcactttttccttgacacaacaatttattttataaatgcatctgctggagaagaaaaggcagtaccaaggattgtgtcttttatctccaggatatgcaaagcgcatttattttcagcttttatctctggaattgtatgttgatcccatacatatagattgattttgttcaggtagataatgaaaagtcaagtggaaaattacacaatggcattcacgatcctagtcttatatcagtatataaattggtttattatttcattctattaaagaggcttttttttggtaccaggaaaacttcaaaatgcattgtgttgtcagcctcactgaattttcttttggaggaggaggtagggaggggaagccaaagccccgatttctcctgctccttttgctaattgtattggctaaatgagctttcacagaggggggtcctggctgctttttgctctcccccagaccacttgtaggttgcacacagggcttctataactctttctgagtcaggacaaagatatccgccgtgcacaccctgtgacataggtggatatttatttcatcccgggcaattctaaattttgtcatgatgactgaaagaggcaatcccctcctgagcattaagaggccaggggtgagagggtggcagcatagaaaagccaccacccagagacagcttggagccatgatcctggaggaaatgttattaataaacatcttttggacatttggtagcccgtggagcttgctccagcttaaagcaattaattcaggacactgacataaactctccagatctttgacagcttggagccgaaataaaaatgctagttctccggggaagagaagaggatggctagcccttttctggactgtttgcttataggcccagagagcaaccttccttgcagaatgaaatgcaagggcacaaacaatgtaccagggagagaatagaagatgggaatgaacagtttgaactatttgctcagcagaagggcaccacaatgctggggtagtggttttcccatgcgtccactgtcccttctttgggatcttttgttgtcccctgtctcctttggccagataaaagcacagctgcagcattgcagataacaagtaggccgtacttatccccctaaatctcggggtgcctttactgtaacaagttatgctcggctctcttttattttacaagaggatggtgagggagagaatggaagaacagagggggcggacgtataagacatttgacactgcctatgtctgatttctctttctttctttctttctttctttctttctttctttctttctttcctttctttctttcttgcaagctgtgatcggatgcaatctttgtgggacatttaaatggaagggttcattgatgtgtattgcttgccaagccaaaatgttgcctttggggaaaagggagagaggtgttcatggagtgcagggaaaggaggttttggggcagagattttgacttaaaataaccagacttcttctggctgctgaaaagaggcaaaagttttaaattgtcaagtttaaaactatgttcagttatgatttgccacttctgaatattattttggatttcccctttcatgcttattttgttcagaatcctaatgaatagaggttgctggactcagggtaaaagcaggatgaactggagatgggacatacaaggtacttttggaattgccatagattacacctataatcagagtaaatgtcatcaacaaataatcaaaatattttttacatttgctcttctaaaatcagagcctattttaaatataaaagaaagtagatgtgataataatataaactacagtcacattaagttgatattaaattcaaaatctaacatagatttgcactgttgggtgtgtgttccgaatcagtgggttttcccactgatgttgatttcgggagccaggcttcaatgtttaattctattgtaatgtggttatttagcctgaatggttttataaggtggaaaggcaaaaaatttaattccgaagaaaactagtgttttactatgactgtggtaaacatttccaaagcccacctgtgggaaatacaaagttttaatgctgtgtgtttttttgtttttgtattttgtctcatcgacaaaactggcagaaaaaaacgctttcgtatatttttcctgctgggtggtcagaaggaaaggccgtgaagctaaaggtctcccactgagacgctgttctgcaaggagccgacctcacgtgccgccgccgccagagaagagagcacctgttcatctcggctcactgtgaggctgagctcagcgctggcaggcgaggggccgcaagcatcccccacagccaccgagagggcatccctgcagggaaatcatatccgacatgcctgtgcccacagcagacttaagactgcctctaaaatgtccatgaagccattgtccagtagagctgttagttttaacaccagtgagtattacctttggttaaaaggatgcatgtgtataggtgtatgtgtgtgcgtgtgtgtttgtgtttttggacttgtgtggagaatgaagaaagggttccatttaggcatttgcaaatattcgatggcatcatgaaaagacaaaaaaatcctataaaatatatcatattttgctatgattttgtgtgtacatgtaataaaattattaagtataaaaaaaaaaaaaaa

SEQ ID NO: 719 - DNA, 158908 bp, Homo sapiens
agtgcgtccgagacgccgcgcggtgatgctcctgaaaacgtctgcccggcgtagcgggaacccagcatgattttcagggtagtaaagtgtccctgtattttacttacagactgtccgattttttagttttatcacgagggtgggtgttgaattcaggctggaagcctgttagttctcgaccatattttaagttttttgtttaaaataatgtggatgaggctctaaaagtatgactgcccttttctttatccaaaaacgtgattgttcttaaagttcagtgttagccagatttaataacctagtatatgtatgtgtccatggccatttttattaagggtttttttttgtttgtttgtttgttttgagagtctcgctctgttacccaggctggagtgcagtggcgcggtctcggctcactgcatcctccgcctcctgggttcaagcgattctcctgcctcagcctcccgagtagctgggacaacaggcgcctgccaccacgtctgggctaattttttgcgtttgtagtagagacggggtttcaccgtgttagccaggatggtctcgatctcgtgacctcgtgatccacccgcctcggcctcccagaatgctaggattataggcgcgaggcactgcgcccggcctgttaaggtctcttaagttaagaacagcattgtttcttgaccaaaatagattttgtagcttcttaggcgtagtttctcccaccccatcctgtgggtactcaaatgtaagatcatattctgaattgtcatcacaggactaggtatatatatatatatatgtgtgtgtgtgtgtgtgtgtgtgtgtgtgtgtgtaaattggtattttatgttatgtacttcagttaccaagtaatgccagacatttcttcagaccttctccaacatatcgtggcatgtaatttactgtgttaatagtagtaagctccaggaatcgtgaggatactttagaagtcttactctttattattgagtatatcacagtgactttttttttccaaaattatttgtttaaataacaaacaatgaggtaaaatgaactttctcgactttgtggcattttgtcttacttggttaggtctaaaaaaatactttttcagcagctcttaagagtaattgtgagaaatatatatatgctgcattctttctgaaaacctaaaagtaatgtgttcatttgcttaagcaccaaaatagcagttaatatgaatgtagatacaggtgagccatcatttccctttaatcagcttttaaggcagtagtatccatttatagctctgatgatctttttcagtgttcatggccatccctataaattttggtggaatttgcatttgaaaaatcagtgcacgtatgggactacagatttaatcataatgtatagaaaaacagtaaaagcagtgttgggtgtgcggctaggtagaaattttccagttgtattttgaaaatgtcttgattttttcatattttattaattaggcaatacaatcagatcttttgatcaatgtaatttaccacagtgctataatttaccctcaaaacaaatttatgtatatctcaatttattttagttatcactgaatattgaaaatatgtaaggacctcaattttttttttttttttttttacatactcgctctgttgcccaggctggagtgcagtggcacgatcttggctcactgaaacctcagcctcccaggttcaagagattctcccacctcagcctctggagtagctgggatcacaggtgtgcaccactatgcctaattttttttttttttgagacggactcaccctgtcacccagactggagtgcagtggcatgatctcggctcactgtaacctctgcctactggcttcaagcagttctgcctcagcctcccgagtagctgggatgacaggcacccaccactacgcccagctgatttttgtatttttagtagagacagtgtttcaccatgttggccaggctggtctcgaactcctgacctcatgatccaccctctttggcctcccaaagtgctgggattacaggcatgagccaccgcgcccagccacaataaaattcttgatagcttaatcttttggaaaaattaatgcttgagacaaaggttctttgtgaaaatataaataaactgctttttaggatctcttcagtgaagctgggaggaatatttggggggttgctaaggtgtcattccaaacttttcagtgttcttcaaatctaataaaagaacaaacatctttagtgtattatacaaaaggcctctttgaatattaatggagtatttgtttggtcactccacacattcattgccaggatctgtcctttgattatgatcatgggagatataacagggcatcataggatatataggaaatagattattaatttttagagaaaaatttggagctctccacctcttcttgtaagacaacactcccagctttccattactttaggtaataatgttagattgaaagtttgggactcctgaaagcatctgtcttaaataactggccttatcatccggttcttaagtgagtttagcttattccatagcatacattacaataatttataataaagctgctatatacaaatatgcactaatatacttgtaatttcctgtaaattgatcctatacttgtttcctagatgtttccaaacagctacctacaaaactttggttttacatgttgcctcaaaaacaaaatgtctaaaattcatatatttactgttcttattctccctttttttgtggtcaaaacatttattgtttcttttcctattggatcatatatttagataatcagttcttctattacatttatctttttcattaacctttagctaaataaatccagattaaaaatagtcttttctcatgaaacttaacctgactaaccaattgcagtgaccttttatttattcagtggttacccacattggctacagggagcttttaaaaaatatgaaaggtaggctgggcgaggtgcctcatgccgaggcgggtggatcacctaaggtcagaagttcaagaccagcctggccaacatagtgaaacatcggctctactaaaaatacaaaaattagctgggcatggtagcggacgcctgtaatcccagctactcgggaggctgaggcaggagaattgcctgaacccgggacggggaggttgcagtgagctgagatcgcaccactgtactccatcctgggtgacacagcgagattctgtctcaaaaacgaaagaaagaaagaaaggttagccctaactcctactcccagaaactgatttaattggactatatgtgaatccgtaaaagcttcctgggttaatgtaggggtgggttgcccctccacacctgtgggtgtttctcgtaaggtggaacgagagacttaggaaagaaaaagacacaaagacaaagtatgctgaaccagcgttcagcatatggaggatcccgccagcctctgagttcccttagtatttattgatcattcgtgggtgtttctcgaagagggggatgtgtcagggtcacaagacaattgtggggagagggtcagcagacacgtgaacaaaggtctttgcatcatagacaaggtaaaggattaagtgctgtgcatttagatatgcatacacataaacatctcaatgctttacaaagcagtattgctgcccgcaggtcccacctccagccctaaggcggtttttccctatctcagtagatggaacatacaatcgggttttataccgagacattccattgcccagggatgggcaggagacagatgccttcctcttgtctcaactgcaagaggcatgccttcctcttatactaatcctcctcagcacagaccctttacgggtgtcgggcttgggggcggtcaggtctttcccttcccacgaggccatatttcagactatcacatggggagaaaccttggacaatacctggctttcgtaggcagaggtccctgcggccttccacagtttttgtgtccctgggtacttgagattagggagtggtgatgactcttaaggagagtgctgccttcaagcatctgtttaacaaagctcatcttgcaccgcccttaatccatttaactctgagttgacacagcacatgtttcagagagcacagggttgggggtaaggttatagattaacagaatctcaaggcagaagaatttttcttagtacagaacaaaatggagtctcctatgtctacttctttctacacagacacagtaacaatctgatctctcttgcttttccccacaggttaatcctaaagtgcagacacacttgagaaccactgaaatacacaagtgtacaagctctggccgacttttgcttatttttaatggcttgcagtttgtttctagttatgggtatatagtcttgagatgaattcagggtctagaaacagctttttttaaactgttaaaataattaaatgggaagtgattagactggggtacctccagtgccctgtgttcctacataagcaaactgaaacctaattcaatgtaaactgtcttaaccaatcagaaactgccaattaacctttaactagggacttttcactggaatggtccaaatcaggctgttgctccactttaatcaaatgttttctttgccttgtttctgcattcatcctgtgaaaatcctccttatcccttcagccctaagtcattgaactactttcaattggggtctgtcctattcatgaatcaattgaaagtttttcttttaactggactaactcaaactttttgttagctagactaaggcagagtttcttaacaaaaggtcaccagcatcatcaagagtgctttttagccgtacgtggacctactgaatcatgttttggggaatctatatttctttctttctttctttctttttttttccagaaagcatcatagttgattctactcatcaagatttgaaaactacccttttacacaaaacatatttaatatttgaggaattaaagtgaattaaattttgtttccctggctagattgtagtaaatgttatgaatacagaaattttgtcttctcccttttcccctcctctgtataaaagagggcttgtcaaggaccgcgtcttattctttggtttgcccagtatgcttttatgttggtaaaagtttaataaatatcaagttgaattctttattccacttatcattttcctacaaagctacatatgattatgaatgtggagggcctttgaggccagatggcactgaagggtagtttcacacaaacttttcttagaatatcagtcttggaaagaccttgaaggtaatctcgcccatttgtttcattttatattggaggaaaccataacacagattgctgagtgccttctacaaagtgccaagattaattgcagagccaagactagatttctaatccagtgctctttattttgtgaactgtcttctatatgaagcatcggtgtttgggttggaggttttctgcttcttaggtacaagaggaagaagaatctgtacagaaccaaaaacatcttaatttttgtaatcaggatgtctacctttactgacaacatttactgacaacatttccttctgaaaataggttattgaaagatcaaggatctttgccagtgaaatccttaactggaagtgggtgggtacaagatagaaaactcatttggtataacaattttgttgttttttagtggaaccttgcttctctgttctgacatttccatgtctctatttatagtagtgatctctttggaatttgccttctgattccatttgttcctttatgttgcttcatattaactgatattctcacttcatttaaaaaaaatttgaagggacatgtacttaagaaaaaggaattaatttttttataagaaatatctggaggtactatttttctatggtttatcataatcattgtttatgccaggttatctaattgtagcaataatataaatactattttttcaagcaagaatgttagttttaaaaaatttatgtgcatattaagctttagacaccttttatccaggacagatattacctttagattcttaacaaccttgctccttaactatgcactttgatataaatgaagattgagaggttttagttagagcttttaagtggtaaacggtcaagggcaggagctatcttatttacctttgagatgacaataatgcctggcatctagtaggtcctaattaatctattcatttattcaattcaacaaaaattctgggcattgttctaagtgctagagatacagtagtaaacaaaatagacatatatctcaccgtcttgtcttgagcatgctagtgagtgaaggtggattgaaaccatggatcactttgcagagactccctattgttttcagacaattatttgtatcagtctaaccaataatatcctgtagctaattaagcaatggtttgaagagtcagaatgggagaagctgaatgatcagatagatcattcattcattaaacatttaatttcctagtgtatgttaaattatttgaaacaagctagtgaatgtgagtcattgtcatcccaattgtcagcctgattcttgtgctctgtttatatcttggggtaaagacttcaagcttctggccaggttacagcccgggaacttcatctcagatcacataccactgaatcctaagtgcataaaataatgtgtgccatgtagtaaatattactacattaatccttaactactcgaaatgcaatttcctcactacttatggccacagcctgcatctagtcttcatccagacaactcaaacaataaaaatcttcaagtctgatattctcctcaagatgacctcttgtcagtttgtttcctaatgtacttcttccgttcctctagtctcttgacacttctcttttctttccatctcttacttgctggctttccttctttgccattcacgtcagtaattctcaactcccactcccctttgtcttttagttgtgtccattctttaaatcaacaactcttaatcagttcaaattgactttggagtcggatgaacttcaaatcaccatttgctacttcagtgaccttgccaaattctttaaccttttttgagtttgtttactccttgtcaccctaagcattgttttgaaaattaaatgagattattgtatccagatacttttgaccacaagtaatgaaaacccttattaaatggcttaaataataaaaaatccaggggtagagtggctctaaggctggttgatgagcagctcaacaatttatgaggtacccatgtttttttcatctttgccttctaccaccctcagcttcttgactttactcccctaatgattgcataatggttgccacagttccaggtgtcatgcagtcatgattgttaaatggaaggggaaagtttctgctaccagtgtccctaccctccacccctgccacaactgccaatcttattaaccttgtcctgaccagagttgagtcacaggcttactctatcaagtgtcatactggcttagaataattaggattcatctcaggggtgagggagaggccccactttcctagtaatagttattcttactactgcatttgtgagtgctaggactcaatccttgtgcccttttaccctatctatgattctagtaatttcctctagtctcatggtttcaaatatcacctacactcttcccaaatttttctcttttaagagacaggatctctgtcgcccaaactgaagtgcagtggtgcaatcttagctcactgcagccttgagctcttgggctcaagtgatccccctgcctcagcctcctgagtagctaggactacaggcatgcatcagcacacctggctaatttttaaattttttgtagagatgggggtctcgctatgttgcctaggctggtctcaaactcctggcctcaagcagtccttctgccttggcctcccaaagtgctgagtttgagccactgtgcctggccccatgcatctttattttatatgtccaatattgaactcctcagtttctcccttctcccctctctattttagtaagtagcaagtctgttctgtgtttgctgaagttgaaaaaccttggtgtccttattggtttttcctcacattccctgtttgattcaccaggaaatcctgttgactctacctttaagatatatccagaagttcaccacttctcatcacctccactgctacatcatggtccaaaccacctgaatatatatgtatattgctacttcagtgaccttgccaaattctttaaccttttttgagtttgtttagtctttggcaccctaagccatatgtatatatgtatatatattttatatatgtacatatatatacataaagattttatatatatacataatatatatgcatacattatatatatacataatatatatgcatacattatatatatatgtgtgtgtgtgtatttccccccccccccagacagtgtctcacttggtcactcaggcttgagtgcagtgtataatcagagctcactgtaacctcaaactcctgtgctcaagcaatcttgcctcggccttctgagtagctagggttacaggcatgtgccaccatatctggctgacattttttatcttttgtagaggcagagtattgttatattgtccaggctagtctgaaactcgtggcctcaagctatcctcctgcctcagcattccaaagtgctgggattacaggtctgagccactgtgcccatcagttcttattggtcttccacccttgcccaccgtctttcccacgctgttaagaatcaaagtgacctatcattcgcgtaaaactctccaatggcattgtatcttccctcagaatgtaagtcaaagtctttagtggcctacaagcctctgtattgcatctgttatttctctgaccatctttcaaccccttcaccatctctatcattctgactcagccaccttgcggttcctcaaagatgccttgcattccctcacttctaggctttggtgtttgatatttccctctatccaataagttctaccatatggatgcatagctttcctcctttcctttcagattgtagtgctaatatcattttctctgaaatcatttctggctaccctatctaaattttgaatctccttatttacattttctgctttatttttcttagcttttatcaccgtctaacacaacttacagtatttaaaaatttttattgtatctccccctactagaatgtacagagaatgaggcagggatttttgttcatactgtatccctagcacctagaaaggtgccttggcatatgaaaggtccttaataaaaatttgtgagtaaatgaatgttcattcattctggtttcagctgggtccttagtgggatttagtaattgtttgtttctgatcagctgcttccctattttccataattgacatactgaactaccaccattcttatcaaacaccctactttactctgaatccttagcagtggatgtccccccactcctctctttttaaacagagtattgatactgtgtatgaacttcttggtcttcctagtccttttactttcaaatttataaattgtcgtcgtctacttccttttgctctcagagcccacctctaattttattcacgtctcatctactggtactcttggtatcaaatcgtatcaaattttatcttctttgagatgtcatttaagcaattatttcttttattatatgtcttacatgtttttaaatatcctcctctatattgttttcttcttctctggactatcttaaaacctcttttatcctttccttattacaagtctatctccttcagacaacttgttagaaatatttaaatttaccatttcattttcatttccctcttaatgttcaatttaccacattctagcttttattggtcacaattctatctacctcatagaattctgagagactaaatgaggatacatgtgtttttaggttaatatttttttgagggctcaccaggattaactattactactgaagccaaaatcattctcactcttacagatacttttctatcatctttatttacttttctgtatccctcatgaaatagcttctgtcttttggtttttggacactagtggtgtcaggatgccttcagctccaagtaagagaatctcttaagtccaatgataggtagttccaagattgatttagagatgcaacactgtcaagttaggctcttactgtctttgtattctgccgttttcactgtgtcatagacgtctacctttaggattgtaagaatttcattattcaaaaacaggatgcagtgctggggtttctccttggtggatatctccttatagggaggaaaatccccagaacatctctcttacatctcattggctagaaccatgtcacatgtctgcccttaaacaatcactggcaaaggaaatactactgtgattgatttaaatcaaccctgagccatccccaagagactgggggatgctctcaccttccttgagttcattactctatttctgggagaagatatctgttagctagaaagaagatatgaatggttctttggtatgtaaccagcagtgtctgccgtagcattctcacctggttgatctctgatggttccttctgtcttttttattgtctcctgttgattgatgtgccccttaaatgctggtcatcccaaagttctgtctttgattctttccaaaaattgttcctccttcacactataaaatatcacttgcattaggatcctttctaaatatttgtctccaactaatatttctaagctccagttcagaatatctcctggatgtcttcatccacgttcaattcaaatgaatattgttgtgttggtttttggtgagtcaaaaattaaataaaatttaccttatattatcttacattttaatgaggtagttagccagagaaatagataactaggaatgcagtcttatgcagcaaaacttaccaactattgaagtagcatagatgaaggggttattaataaggttacaggaatgttcacagtagaacttgtctttacacttaaaaagtactcttcttatattctatactttcattagtagcacaactgtgcacacctttgtcaatccagaaatgggcagtctgaaatccttcctcttctctacatccagctgatgggcaaattatacagatgctatttcttactacttaatcctacctgttggtctggttatatcatagtcatcctactttaggttcttgttatttctcatctctttgtgattcattcattcagtaaaagtttattgaacagcaatatattgtaaacgccttgttctagaaataaaacaggaccccgctggttacaatccagtggatgaggcataaacacacagatggttatgtaaggtgatgtgtaatacagtggagatatggggggaagtgtaggagctcaaggtccggggaatctaacccaagtttgggcttcacagaagcccatctacagggtgagtctcaaagcagaagtaagctaggtgaagggctcctggagtagggaagagggaaatacacctacacacatgccctatttgctttatatataacaaatatcccttcaaaggtattaactttggtgcctgtgtactcattaatgttaccgttgttcaaaaacaattttttaactgattatggttaatgcagaagattctcagtaatgatattattatacagttgattctcattatttgtcagttctgtatttatgaatttgcctactcaccgaaatgtatttgtaaccccaaaagcaatacttgaaatgctttcaaggtcatttttagacatacgcatgttcagagtggcaaaatatttaagaactagctgagctttgcacagaggctcacatctgtaatcccaccaccttgggaggctgaggcagaaggattgcttgaggccaggagttcaagaccagcctgggcaacatagtgcaacccctcccaccatctctacacacacaaaaaatgaactagctgaggttgaacaagtcagtggtctgccctcatgtttcagctctcatacttttaaacaagtctccttttcatggtccatttagtgccacatttttgtatttttgtgctttttttttattggtgactttactatttaaaatggcctctaagcatagtgctaaagtgctgtctagtgttgctaagcacaagaaggctgtgatgtgccttacagagaaaattcaggtgttaggtaagcttcattcaggcatgagtcatagttctgttggctatgagttcaatgtcagtgaatcaacaatatatattattaaggtatctttaacagaaatacacatagaagaggttatgtattgaccagttgatgaaaatgtgaccagagcctggcaggaacctaacactgtatttcccttaggggcagtgattcactattctctaatttagcatttgggatgattttatagaacataaccatggcaaatgttttatagaacataactatgggttttatagaacataacaaatgaggccgggcgcggtggctcacgcctgtaatcccagcactttgggaggccgaggcgggcggatcacgaggtcaggagatcgagaccatcccggctaaaacggtgaaaccccgtctctactaaaaatacaaaaaattagccgggcgtagtggcgggcacctgtagtcccagctacttgggaggctgaggcaggagaatggcgtgaacccgggaggcggagcttgcagtgagccgagatcccgccactgcactccagcctgggcgacagagcgagactccgtctcaaaaaaaaaaaaaaaaaaaaaaaaagaacataacaaatgagaatcaactacttcagggtaaatttcattttgggaaatagccattatcatttatgaccaggaccgatgaattagatgggaatggtcaaggggaacaatacagaggtatgattattaaacagtctttctctgccttttaaaacacatgccaccctttttgataagcatctcacctcacactttaaatattctaatatattccctttagcagtcatgtccaggttgagaatcagcgtataagttttattttaccatcagacaagcaaaaacaggttgacctttattctttttttttgagacagagtctctgttgcccaggctggaatgcaatggtgcgatctcagtcactacaacctctgcctcccgggttcaagcgattatcctgcttcagcctcccgagtagctggaattacaggcatgtgctaccacacctggctaatttttgtatttttagtagagacagggtttaaccatgttggccaggctggtctcgaactcctgacctgaggtgatctgtccgcctcagcctcccaaagtgctaggattataggcttgagccaccgcgcccggcctatttctgagtgtttattgtaaaaactatagtttttaaagtttgccagatgcaataaaattttatcatgtttagtgctttatttagactttgctctccctccagcgaagaataatttgtataaagcagaagttggcaaacatttcctggtaagggccagacggtaactattttaggccttgtgggccatacagtctctgctgcagctactcaactctaccgctgtctggcaaaagcaacaatagacattaggtattactttatatagttatagtataaactcctttttcttttattttttttcttttttgagatcgagtctcgctctgtcacccaggctggagtgcagtggaacaatcttggctcactgaacctccacctcccgggtttaaacaattctcctgcctcagcctcccaagtagctgggactacaagtgtgtgccaccacatctggctaatttttttgtatttttagtagagatagggtttcaccacgttggccaggctggtctcgaactcctgacctcaattgatccgccctccttggccttctaaggtgctgggatataggcatgagccaccgtgcctgacttatttatagtataaactccttaagggtagggactatgtattatactgttttatccttcatgttacatgtaacagtatagcacagtggggtctcagtaatggttggcttgatatgctgatttgacctagataacaaaaagtttatatttttgaaatattaataacttgaacattaaaacccatccatttacagttaatttattttagagatatatttttctctaaatatccttctttagacaattataatagttcaagcttatgcatttggaattaggtagtcaatggctgaattttatagtagttggtaaatactataggacatacgggcttatttatataaatgttctaatacttatatttggtagccattattaaagtcttcgaatcatagttaagtctccatggtagcagtggtttcgtgattatgttttaatggatgcagtatacgataaagttaattcatagttaaagtttggtactgatttaaattaaatcatttgagaggccaggcacaatggctcacacctgtaatcctagcactttgggaggcggaggtgggaagatagcttgagcccaggagttcaagactagcctaagcaaaatagggagaccctatctctacaaaagaaaaaatagctagacatggtggcacatgcctgtagtcccagctatttgggaggctgagttgggaggactacttgagccccggaggctgagactgcagtgagccataatgaaaccactgcactctagcctgggtgacagagcaagactgtctcaaaaaaaaaaaaaaaagaaaaaaattatttgagaattgtaaacaattagctaaacaaacttgctaaataatcagtttgttgcagtcttggctaagagcctaataattcaatgaaacagctgcatatcctctcctcctcttgggctacagacattttttttctgtgtactccttaaactactctctctctttttttttttttttaactactctcatttttctaatgagccaattaagatgacatctcaggccacatataagaaaagagtatgagaagagacattttagaaaagataaaagtgaaaatcacgtagattcctcatttccaagtgttgcttttacaattaaacattgtgaaagtgtatgtcaactgagcatgtgtaaatacattcctactaccttaagtgtaaagtattattttgaaaaaaattatcatattgtttatatggatgaacaatgtagtactattttataagtaaaatagagttcacctgttaagactttatttaccctaaatgtgcatgtgagaggtatgtatgtgtggtatacttgggctgagattcacaggctgagatttctgaaaaattggattatagtactgccgactagaaggaaccactagatctgcactgtccaacacagtagccactagccacatgagactcttaagctactgaaatgtacctatctgaattgaggtcaaagtgtaaaatacatgctgtatttcaaatatttagtacaaaaaataaagaatgtaaagtatttcattgataatttgtattttgattatatgctgcaatgataatattttggatttactaggttaaataaaatacattattaaaattaatttcacgtttgtttttactttaaaaaaatatggtttctggaaatgtggcttgcatttgtagcttgctttatatttctgttggacagcactggtctaaatagtgtgatctttcaacacaggcaaaatgttataatgaaatattagtttatcaagacccatttaaaatgatgtagaaactctagctctttttaaaattttttggctaatacagtgtttttggttttgagacagtcttgctctgttgcccaggcttgaagtgcagtggtgtcgtgatcatggcttattgcagcctcatctccctgggctcaagtgatcctcctgcctcagcctcccaagtagctaggactacaggtgcatgccactacatctggctaatctgttttattttttgtagatacgaggtctcactatgttgctcagctggtcttgaactcctagactcaagtgatccttttgccttggcttcctaaagtactgggattacaagtgtgagctatcaccctgggcctaactcagtgtttaaaatcagtgtaaagaacactttattttaaattagctgggtgtggtggcacatgcctgtagtcccagctacttgggaggctgaaataggagaatcacttgaacccgggaggcggaggttacagtgagcccagactgtgccattgcactccagcctgggcaacagagtgagattctgtctcaaaaaacaaaacaaaacaaaaaaagaactctttaaattatttcaaaatgccagaaaagtatattagctcgccatacattcactagtcattagcaagctttcaaggacttattgtaaaagagggtaacaaagaagggctagttgttgcttgaatattttattcatcccagttagaataagttagttctatactccccaaaaaaggaaatgatatatatattttttggatacagggtcttattgtgtcactcaggtttgaatacagtggcatgatcacggctcacctgcagccttgacctcctggacccaagccatccccctgcctgagcctcctgagtagctgggactacaggcacatgccaccatgcctggctgatttgtaaattttttgtagggatggaattctcactttgttacccaggctagtctcaaactcctgggctcaagtgatcctctcacctcgtgcttctaaagtgctgggattacaggtgtaagctactgcacctggctgatttatttttttaagtataaaatatgtctgatcccctgggtgtctccaaatctagtaatttctatacatttaaagcaattttattttcttgttttttgaaaggtaggtactttttaattttttaaacaatttaaaatcttgttttaaagaccactagacaaaaaaattaaatgtatatattatagtgcttcggggaaagtattataaaaccaagccatgacacagtatcaacatttgaaaacttggggaattactaatattactgtagcgataaaatggaaattttgatgatacagacaatagtccacagagaattatgactaaaattattcttcctaccaaccattttaagttagtttgccatcttatgttggtgctcttggaggcttacaaattattattatttgagacaggatctccctctgtcacccgggtggactgcgatcacggctcactgcaaccttgagctcctggtctcaagtgatcctctagagtagccagaaccacaggcgtgagccacagcgcctggccaggaagcttacagattattaatgaaactttgttaagaaccctttaccttactgacaaccagaaaagtaatttcactggtttgggaataaatggacacttaagaaatgaagcaacctcttcaagtaattttttttcaaagaccaaactattgaattagtgctttttgaagagcataaaagagcagtcatcaagtgtgacattaaaaactttcagctgggtgcagttgcacatgcctgtaatcccaacactgggaggttgagacgggaggattgcttgagcccaggagtttgagaccagcctgggagacatagtgagaacctgtctctacaaaaaaaaaaaaaaaaaaatctatatctatatctatatctatatatctatatatatattagcaagatgtggtggtggtgtgagcctgtaataccagttacttgggaggctgagcccaggagagatcatggctgcagcgatctgtgacaatgccactgcactccagcctcggtgacagtaaaaccctgtctccataaaaaaaacttcgaacaatctgaccgtaacttattttctgccagcttcccagggcaagccttcctaatttgcatgcattaatctcaccagtatttttgctgtatcaaatacattttatgctcttttgcttcttgacttagtgttcctgatccaaattgcaaattctccctttctctgtcaaaatctatcagtctttcatgactttgctcacaattttctgttctgaagtctttcctatccccaccactccagcccaagttgaggataataattaactttttttttcttcttttctttttgagacagtctccctctgtcacccagtttggagtatagtggcatgatcttggcccactgcaacctccacctcccaggcccaaatgatcctttcacctcagcctcctgagtagctgagaccacaggtgcacgccaccatgcccagctaattttgtattttcacggggttttaccgtgttggctggtcttgaactcctggcctcaagtgatctgcagtccttagcttcccaaagtgctgggattacaggcgtgagccaccgcaccggcctctgtttgactatctttaaagctcttaaaacgatctcatttcgttattaactttttattgtttgtcttccccctctagaatgagttgaatgagagcaaggataatgtctatctagttaacagcacctaaaatagtgtgtgacacaaaataaacactccataaatatttgctgagtgattgaaatactttatttgtggaaaatgtgcactatgataaccacctttttaaacagtttgtgtacccatcaaatactataaaatggacagtcagatactgttgacaaattccaaatataatgaatccaaactactgtcattgcctaaaaaaggacatttacaggtaaggggcgtgggagagtaggatttctaaaacaatttaagcttaaatggatagggcttaatgtcttaaagacacttgccttaagtttatgtatttcagcttgtaacgtagataaggtaagaagtgaatctctttaaaatttctcagctgagtgcggtggctcagacctgtaatctcagcactttgggagaccaaaatgggtggatcgcttaagcccaggagttctagaccagcctgggcaacatggcgaaacctcatctgtactaaaaatagaaaaattagccaggcatggtggcatgcctgtggtcctagctactctgggggctgaggtgggaaaatggcttgagctcaggaggtcgaggctgcagtgagctgagattgtgagatcaggaacacaatcagcctgggcaacagagtgagatcctgtctctaaataaataaataaataaatagattttatgggtctgtatcttggcaacacatacacaataaataaaaatttccctatttttcccctaaagacaaagttgcatttgtagccatcacaaaattaaaaggtactgtaagtattatgctctggaaccttttcacaggaatgagaattgagggtctgagttgcaaacttacatcaagcatttgctctatagcaatctatggtaatgatacctcttagtgcttactggttttttaggaaattatagtatgtagaggtaagatatagtccgttattaaatggccaataatttgattttatataactatttagatattatcttaaaaacaggtgaaacattaggatagacacagcctagtaccctctagttttatgtaaatattggaacagtgtatgtttaagaattgtcaagaatatcttagctcattattagactgtagctatagaaaagctctttgaaatcttatcacttgagtatcagatgtatgtgagaaagcatatggaagtattttataaactgtaaagtattatataaatgttattatggggaaggcatagaacaggttttttttttttttaacactgagaagatagtaaaattcagagataaaggtctgaaaagggaacttggcaagaggcaagatcttgggggatgccagactcctttgggggtgaatctggtagttactttaatgctttatgccaagtaaaacttcctgagtcaaaggagactatttgtcaataaacatccaagtggtagcaaaatagtttatatagcttaaaatactgaaaataatgtatatgtagatgtcatataaattgtagtgctgacacatgtactatctcatctgactctcacaataatctttgtgagttaggtattcagataatttaaatgattcatctaagttactcacctgttaagtgggagaactgagattagaaaccaagtattcagatttttaagtctttattcttttgtactagccctctaagaggaattgataaataatggtttcccctagataattttcaagtaatttggtacgactgagatatgtgaggcatcaacagatattaaggctggacagatcttctgattccaaaatcaaatatatatactttaagaatataaatattggaactgaaatacaatgaatgctacctatgggaagttttaatgattttaaattttaacaaaatcaacatgaatgagtagcaaatattaactggaatatttagaaataccaattggacagctgtgtgtgtatgtgtgagtgtgtgtgcatgtatgcttataaataagaacattttgttatgcatatggtatagtaattttcctggaaaaaaaattttcaagttcatatgagatcatcatcatgataagagtagccagcactttggtattcctcactacgtgccaatcacatttaagtatcacacattgattgcatttaatcctcacaacaatcctaaattggtattaatgttaccagcttaacagttaacagagttaactctgtttgacagatgaggaagctgaggtcagagagatttaagtccaaggtcttacagctgtaagtagtattaccaggattctaacccaggcactccagctccaaaatctatgcttttaaccactatattatgaatattccctgggtgtcacctcggcaaatataatcacttttacatactctgaggttatatattcaaatatctaaagcactgttaacagagtttaaaagagcctcagtttatttgcttattcttggacaggaattattggggaatggaggtcataattttctaatatgaatgactaagaaatttcatggccaggcgtggtggctcatgcctgtaatccagcactttgggaggccaaggcgggtgaatcacgaggtcaagagttcaagaccagcctggccaaggtggcaaaacctcgtctctactaaaaatacaaaaaaattagctgggcgtggtggcacgcacctgtaatcccagctattcgggaggctgaagcagagatttcttaaaacccgggaggcggaggttgcagtgagccgagattgtgccactgcactctattctggaccagcctgggcgacagagcgagaccctgtctcaaaaaaaaaagaaatttcagggtccaagcaccctggtttatgcctgtaattccaggatcgaaatttcaagtaccaagcaccctggtttatgcctgtaatcccaggatcttgggaggtcaaggaaggaggattgtttgagctcaggagttggagactagcctgggcaacatagtgagacctggtctctataagaaattaaaataagccagatgttgcattggcctgtagtcccagctactcgagaggctgaggcagcaggatcacttgagcctaggagttcaagggtgcagtgagctatgattgtgccacttcactgcagcctgggtgacagagcaagccccatctcaaaaaagaaaaaaaaaaaaaatttaggactaaatatgacccatttaagaattaaatattgccaggaaaagttattcacaggtgcgatggtaaaatatgagaagtcatttgtcctccagcatttaagtgatgatctgaattttgatgtaatttcttctgagactcatggcattttatcttcttctgtactattttattataaactgagaaatgatttgtgagttggaaaaagaaaacttgttttttattatatatgaataaagtcaaagtagaagatgaagatgacatcaactgaataacaaattatacttttagttttttgtggttaaaatgctatcttaatttccattttttaaaaaaattagtttttagtagagataaggtctcattatgttgcccaggctggtcttgaactcctgagctcaagtgatcctactgccttggcctcccaaagtgctgggattacaggcatgagccacctcacctgactgtacttttcttataataaagggaagataattgtgttttcatggaataatcttaccaatgtttgagtagcaaagtaaaaatttaaaaatgcaagtgctaatttttatatctttgttaaaaatgcagcattctttagttttaagggaaaaaatgtatgtcagttactaactcaagctagtttttgttctcttcaaactttccgtcacacatacatgtaagctataacatcatataagcagcatttatgtgatatctaaatattccatatagactatttctatgtatttttttggttttattttaacctttaaaaaagcttttatttattttacttttattaaataagctttgatctcagctcttctctgttccatttcccctacaggctaccactactctcccttttacatactcttcctgtttttgtcataattatttgcaggaatgacaatcccaacccctcccccaaattgccgcattcatatcatacaaacttggatgaccaagatttaatgtaaagtgatcgtattgtataatggattttcaactcctaggtagtagagaagacatctcagtctgaaaaggtgaatgtaagggtaaaatatctccaaaatgctatgtacttttaaagatgatcatcttgatgctttaccctatttcatctatttgcaatgggtatatttgtacatataattattgtctttaaattattttctaaggataaattccaggtgtggtatttatagagctattaaaataatatttagtggcttttactattgccaaatgtttgaattatttacaaagctttacaaagctataagtgtgcaagtatctgttcattttaccaaaagctagccagattgttgtattaatacaacaatcacgtaatacaacaatcgcgtaaatcacgattatatttgctttcttattaacttgaaatgtcaaagttgaggtgaattcttgcttttcaactttacaattacgattcttatgtgtgtgtgatatttaaagaaatgtgaaaatcccttttcacccttttcagtgtctagggagccagatttctttccgtctgttaatatataatacaatttctcacaaatatgaaagacccggtcttcaggttctctaaaataatttactgtgtcaagttttgataatattcctagctctctgaaaatgattgaatcaaataagtgtctattttttttttctgcaaacactacccgccagaacaatttccggttgttaaatagtaaagtcaccgttcctttggtaaggaatatttaaaggaactcccttggaaatgaattttgtaataggtgatttttattctgtttttactctatgtgatactgatccttgcactggatttcagtttggcaatatgctttttaaaactgggagtcttaaggtgactggatattagcatttttcactaagttttttggatttgaaagtaccttttgatattatttcttggtgaggctaaaaaaattgataaatagctgacaaacctctgtaacctacaggtaggctagatcaatgttatacatttctaatgtcatggtgttgttaaagtagagaattttgaagagtagaaaatcgtagctgtcaaaatgcacaaagatgaacattcagaaagaattgctgaatcatcattgcttggcatatagagtaggcgttctcatttctttaaaggttaacacatgattattaccctttattatattctaaacatatatgtacattttcttttcctcataaaggttttctaacattttatttggactgtgtgcaattcttctgacttttcttatttatctctctaatagaaatgggaacatttttgaaaagatgagaaaaccatacaggagataaaagatgagttatatacatagaaaatgtctcataaatacctgaaatatgttatactttcaaaagcaggcatcaaaagggtatataaatgctatgatctaactttgttaacaaaaaattataaaactacagcaaataaccatgaagatttatagaaaacagaattagaagtaaatacagtaatatttaacagggattacctaaaatgatattatagggagatttttaaaaacttttttctgcgttttccaaaatctccaacaatgaatatatatttataattagggaaatgtgtttttgaaagaaaaaatatttctcatattactgccccttaagtggcatatccaaattttacattgatgcagttgcagttaagtcttgtaaggaacatgagtatgtactgtctgtaacctgatactttgttctagctttcctgcagcaccacagttctttaaatagggatcctgtggggcggctgcaggggacgggggttgaggggtggcagggacctcattcagttttagtttagttgaagtaactaagttcagatactaaaatttcaaaaataagtatttgtttgccagaactatgaactcatgtatactagaaataactagttagctaaaatcatgtttaagtcctttacttattttaaaataacgcatttgaattttattatagatactcccttaacaatgtgaaactagtacacaaactttctggcgtttctgattgatagaccccaggaattttgaagacgacataaattacttggaaatcctaatttaaacaacctgcgttttggtattatatacttaacagacaaatagcttaaaattaaaaaatccctaaagtagaattgtcgttccttttatctgtatattaactttaacttcttttaacatagggtgtttaatgactgtgatgattttcacctagtatggagtacataaatatatagttgtgacattctgtgttgaaatattggcatgttaacccatttgtcctgtttaattaggaaataaagacggtagagctagtcggaaaatgaatagttaatcgtggaggaggagaaaacatagctcagtactttgactagaggcagctgggaaagtgacgtcctgtagcatttgctgttctagaaagtacagagacacgtagtgaaaatgggaggatctagaaggaggctgtctcctgtgtagtgtatatttatctgtaagtgagccgttggggaaggattgaatacagagacgctgtctgcttgctgccttaagacagctagctgaattgctgattaacttttaaaatacccagcttggtttatttttcttagaatctgttgctaagactggggacgctgttttcttttacaaagggaaatctaagttaatttcaaggcattcgaaatggggaaagactattattgcattttgggaattgagaaaggagcttcagatgaagatattaaaaaggcttaccgaaaacaagccctcaaatttcatccggacaagaacaaatctcctcaggcagaggaaaaatttaaagaggtcgcagaagcttatgaagtattgagtgatcctaaaaagagagaaatatatgatcagtttggggaggaaggtaagtattctctgtatatctttctgtctcttcagctctgtctcttttttttttttctctctctctgccagcctttttcccctctctctcagcttgttaaggttatccttaaattggattctcagtcatatcaaaagtagaaggacaaatgtataataacaaggtttcatctctgatcatatgaatgagtattgcagagccatgaatgaaatgtccttgtttgccttttttattttagcattttgtattatacatattttatcattagacttacaatgttaacaatgtatattttaaaataaaccttgaattcccatacctattagtaaattgtgtcaaaagtcttatgaaacctgtttcgttttctaatgaattttctgccagaaccaataaagagtctttagtcatttaaaaccttaagattggcatttcagattctgagtagtttatagcttattcacaaaaacaaaaagtagttttttgcctttcttatagcaaggctagtttagactgaacaagacagagttgtgactctcagaagcagaaggcgcaggcatttagcttctagttgtttttggcattctgcctggagaggaaagaattttcctgatgtcataaaataccagaacaagtttttagcttaattgtaaacaataattttgtgccaagaaaatgaaatctcagaaatacaatttttgacctaaaatggccacctagttagaataattactgatttacttttagataacattatttatttagaaattttactatctaggtatagagaaaaacatgacaacttccctttcctctccctgccatacttttgttttttgcattgtgagatcaaaaactagtgagcacagtaaaggaggataatttcagattatccttttctcattctgcattttaaatcaggtttgtccatcacttccatataaacggggctatgaagtaagactattttaaattgctaattgataacacaaaaaactttaacttgtactgttttggggattttcaacttttaacatcaggactaagttattttattattagtttttctcccaaaatactggctttcaaatcactgtagctatgaaaacttgttatccctttgattcctttattacatttaacatcaaattttcctaattagaaatatatccttaaaatatagtcaagcagtgactgcttattttgaatgaaacaaattaaatgtagacaagcagggtgattgtatatagagggttttttcctttttgttttgtttagcttttttggtctatgagttgcccaaaattgaagtttatgttgcaggttttggtgtggtgaggacctacagtgtcaggttcttacaaagtaaatattgaaaaaggcaaatactgggcagttcaatcttgcatgatacctatggccatattacccaaaatatcatgacttggtttatctcaaaagctaagcaggattctgagatactaccaataatgtactactatttctaaaggagtaattttgtaattttgtaaagaaattcacaaacatggaatgacactgtgaattcctgtgaaaaagcagatatccactgctttgtatttaaaatattttgcaacaattcactgatagctcaagtttgtggctaagccattggatccagggtttagtaaggatatttgtcttcagaattttcaagtcaccaaatgatacatttttcttgatttaacattatctcttaatagtgcttttctagagtgatttttctcatttaatttttattggtcattacacaatgagtgaattttttaaaaactaaatcaccctgaatctgtataccctgggtttttttttttaacttacataattgatataagtgatagaaggaaagagtgaggagagaatgccttttttaaaacatagaaatatattatgcagaaataccattctctagttataggttacttgaaaatacaattgaatgggccaggcgccgtggctcatgcctgtaattccaacactttgggaggccgagacaggcgatcacctgaggtcaggagttcgagaccagcctggccaacatggtgaaaccctgtctctactaaaaatacaaaaattagctaggtgtggtggcagacacctctaatcccagctacttggaagggtgaggtaggagaatcacttgaacccaagaggcagaggttgcagtgagccgagatcgagccactgcacttcagcctgggcgacagagcgagacctcatctcaaaaaaagaaaaggaaaaaaagaaaatacaattgaatgaaagttatttgaattattttttagaattattcttccttcacaggaaagtattatatttgtttgccgtttattcagaatatctcatttattctattaaaaaatcccatttagatacactgtgaaagtaggggaaaacattttttctctttgccttttatttatctccagacgtggttccataggtgtctccagtagtaacaaaacactgaactttaggactatggaaacactattaatttacctggtatccttcttcccgctccccccaagttattacagtcttgggacttagagctgggatggtgggaataaggaaccataaactgaaaagtatgtaagttgcatatgctaaatttatgtatttaggagtgaaagaaccagtaatccagaacacagtatatttgtgttctgaatattcacaatttaaaatgctttgttttaaaaacagttggctagctgggtgaggtggcatatgcctgtagtctcagctaatagggaggctgaggctgaaggattgcttgagcccaagagtttgagtccagcctttgcaacatagcaagaccctacctctagaaaaagcaaaggaaagaaaaaaaatacggataactcaaatttacttttaggaatctataaaagggaaacaaaaacatgtccacacaaagacatgtacctgaatgcttatagcagcattatttataatagccccaaactggaaacaatctgaaagcaccataaattggtgaattaaacaaaatgtgctatatacattcaatgaggaactatttagcaataaaaggaccaatttgtgaaacatgctacaccattgatgaacctcagaaactatgctaaattaaagaagccagatgtaaaagactatatattgtatgattttatttatgtgaaatgtctggaaaaggccagtatatagaaaaagaaagcagatctttcttgcctaggacttgaggtgggagcggggattagctacaaataagaactagagaattctttggaatgatggaaatgttctataactggattgtgatgatggttatacagctctatcaatttactataatcaattgaattgtatttgtacaataggttaattttatatatgtaataaatctttttaaaaataaaatttctctatagttgaatcatttgaaaacaaaaaccacagaactacagaaatttaaaattggattctgaaccactctctaaagttttaggtttagtcttgaatagtttagtggatgtcaacaaaaatttgtgttaagagatttaaaagaaaagattttcaataacacatcctcatttattctagttttctaatttttctttttttatgctttccttattttgttattgcatatgatttattcagtaacttcaaatattaaaaggtagtgtttaaatgataaaacttgtatttattaatctttatactagttctcttctgttctttaacttatatatttagctagctggattttttttaattcactgtgtgttctaaaaacatgtaagtaaatttgatttttgtgaattaaaactgtttaaaaaatctcagaatctcattatttgataactgaagtcttgctgtaaatctggatttttacatattagatctccttggatggagtaagagttattaaagtattatcatgtttttttctttgcaatctgaatttttctccagtgtttcttcttttggaaacttttagtcaaccttaactaattagtgggaatcattgttatagatagtattccaaacacatatttggtttgggactgcaaactggttgactggttagttgtaaaataatagcagtcttgctaaatcataggcaaatgttgcttctctggtgcgttttttgatcacacaaagtgatgacgatgtctagaaaacattttgaatagcagagggaatccaattggatattaaacatttccattagcgttcaaaatgtacatgattaagaactgaccatatagttaatgtgacattacttataattttatgtgctagacaatgcaagtgatacttgcataataatgtatattaaagtggcatgaattttggtaggatttttttcttttttttgttgtttttgagacagaatcagtctcctgagtagctgggattacaggcgtgcgccaccacgcctggctaatttttgtatttttagtagagacgaggtttcaccatgttggtcaggctgatctcgaactccagacctcatgctccacccaccttggcctcccaaagttctgggattataggtgtgagccactgtgcccagcctaggatttttttcattcattagagtagcttcgttctttgtctgagctgcatagttgactgtttaatagtgtctaggaaaacctcaaagctgcattggagtctttttatcagctttggtaagttacttcagactttgtatgaatcttctcagagactttgtaattatgaccgaattgccctttttggcagaggaggaagaggttttccagaaagccaaacccatgatgtaataaattaaaacattattctttcttttcatgaattcattatgggtgcaagtatttaaattttgtcttataagaggctagattgggcaggctgatttacccagtttacttaactcagttaaataattatactcccttaagtctatgggatgaaggataaaattatttaaataatttaagcattggttgagtcactttggtcatgaccttgagctacatattattctatcattaaaaaaaaaatctgccattacctttttaacatttggagttataattatactactaaaatttataaaagggaaatttggatgagctgcttatgaaaagatcttgtcctgcttatacttgtcattctacaaggaatttccctaactgctatttggatatattgttcaatacatattttggcaattttcagattattaggtctctcttgatctctccagatttctattcatggatgaaggtaaaaattttagatatcacttgagaccctgttagatgaaatagagtagatatataccttttaatggaagaagccaaatgcagaataagacgtaagcaaaactaagtttctttaaagtatgctgtgtgttagtggcattttaaattgttaaatctctcatatatgtatatgtgtgattatattttacattgtttttgcttctgcctttttctctgtaccgatactcaagacaccttttttagttttgatttagaaggactttaggaattagttcattcccttcattcactaagcatgaatacctaccattttcagccctgtatgcatgagcagtgcaaaataaatatatttcctgccttcaaatcactcactgtttggagatattagaatctcctagcttaatctgttggatttttcatagttttatgatttttagattcttttcctgcttgtttcttgatctgtattgaccccttaaaagatcaccatactgttgttttttgagttttagtagaacatttctttcatagtggaaaatgttgtttcaaatataatcttttgtgggttaaatattacttagtggaacccttaagcaaagggtcaaaaagtcactatattgttgcctgaggtggactgttcacaagagacagaaataacccatatagaggccttacgtgtcaaagtttacagctcttgatttcagtcttcttacaagcattgaaattaatgctaagatgtgatatgcctaaaaaatttggtatctagagtaggaatgacaatcgtagtgtctaaaaaaccatttttcatagaatgtcctcattattagaatttttttcactctctgacacagagttctattttaattcttttttttttttttttgagatggagttttgctcctgttgcccaggccggagtgcaatggtgcagtcttggctcactgtaacctctgcctcccaggttcaagcgattctcctgcctcagcctcccaagtagctgggattataggcatgtgccaccatgcccagctaattttgtatttatagtagagacggggtttcaccatgtagaccaggctggtctcgaactcctgatctcaagtgatccacccgactcggcctcccaaagtgctgggattacaggtgtgagccactgcacctggccctattttaattcctaaacagtaaaagatgatctgaaataaaactagttagaatgaatatggtatttttattacattatatttttacatatttctattttatttatatataaacagtatgaatatggtattttatattttgctatatattttattaatatatttatatttttaaatgttatatatattgtttgattgtaataaaaattaaagatttaagttctgcactttgtgttgattgctgaagaccttccaactgacatcttttaaaaacttatatatttataagtagatacttatataatttatatacttcagcatgccagatcagtagtttataaggagttcccagttttattttctttttcttttcttttctttttttttttttttttttttgagacagagtctcacactgttgcccgggctggtgtgcagtggtgcgatctcagctcgctgcaacttctgcctcccaggttcaagtgattctcctgcctcagcctcctgagtagctagtattacaggcacctgccaccacacctggctaattttttgtatttttagtggaggcggggtttcactgtgttggccaggctggtctcaaactcctgacctcatgatctgcttgcctcggcctcccaaagtgttgggattacaggcatgagcctctgcgcccggccttattttatttttcttacttacccgtggaacaaagaatcaggaataaatattagagatgctgatttggccggaagcagtggctcacacttgtaatttcagcactttgggaggccaaggcaggcagatcacctgaggttgggagttcgagaccagcctgaccaacatgaagaaacctcgtctctactaaaaatacaaaattagccgggcgtggtggcacatgcctgtaatcccagctactcgggaggctgaggcaggagaattgtttgaacctgggaggcggaggttgcggtgagccaagattgcgccattgcactccagcctgggcaaacaagagcgaaactctgtctcaaaaacacaaacaaacaaaaatgctgatttggaggaagaatttgaaaacttaacaatttaacttaggatgtaatcatcaagagttttatagctgttctgtatttagtaaagtggcatttctggccaatattaatacattttaatgtaagttagccaaaatttattagcaatacagtttttgaaagtttaacttttaagagttgcaagcttttttctaatcatgcttatctcttcaattagggttgaaaggaggagcaggaggtactgatggacaaggaggtaccttccggtacacctttcatggcgatcctcatgctacatttgctgcatttttcggagggtccaacccctttgaaattttctttggaagacgaatgggtggtggtagagattctgaagaaatggaaatagatggtgatccttttagtgcctttggtttcagcatgaatggatatccaagagacaggaattctgtggggccatcccgcctcaaacaagatcctccagttattcatgaacttagagtatcacttgaagagatatatagtggttgtaccaaacggatgaagatttctcgaaaaaggctaaacgctgatggaaggagttacagatctgaggacaaaattcttaccattgagattaaaaaagggtggaaagaaggcaccaaaattacttttccaagagaaggagatgaaacaccaaatagtattccagcagacattgtttttatcattaaagacaaagatcatccaaaatttaaaagggatggatcaaatataatttatactgctaaaattagtttacgagaggtaagttggtaggacctaaaatcctaagaccaaataattatgtagttgatcatagggagtgtatctagataatagctaacatttatttaatgcctattatacgttaaaaataattactataaaaatcctctaagatagtactagtattatacctcttttatggatgtgattatattttctaactttagttacttataattaaagtgtcaagtgttaactggattatgtactatgaggctgcttttacaaatgtggtttatgagatctgcattggtaatctcaacacattagtctttgtatatagggtttgttctaaatttgttaatatggagtaataattgcataccaaaaaagattagaagaaaataatttataattcactacaaatttgtatacatttatattaataaaaaatacatttataagtgcatataaatatatacatttataaattataatgctactatgttaatacaattattatttgagttcttatttgcactatttcttttttttttttgagacagagtcttgctctgtcacccacagcgcaatctcggctcactgcaacctctgcctccgggttcaagtgattctcttgcctcggcctcctaagtagctgggattacaggcgccccccaccacacctggctaatttttgtatttttagtagacacagggttttaccatgttggccaggctggtcttgaattcctgacctcaggtgatccacttgccttggcctcccaaagtgctaggattacaggcatgagccaccacgcctggcctatttgtactatttctcaaattggattgtaactttgcaaatatggtcatagcagttccctgcttcaaattcttaaattgctctatataacctctaccataaagtccaaactctttagcttaaaataagtcattttaaatctgatgtctacccataaaatgtatatgcacttccccaagtttgctctattattattattattatttttttgagatggagtctcgctctgtcacccatgctggagtgcagtggcacaatctcagctagtactgcagcctccacctcccaggttcaagtaattctcctgcctcaggttcctgagtagctgggattacaggtgcccgccaccatgcccagctgattttcatatttttagtagcgataggttttcaccatgttggccaggctcgtcttgaactcttgacctcaagtaatccgcccacctcggcctcccaaagtgctgggactataggcatgagccaccgcacctggcccagtttgctctattattatcttgtatacttgagctgtactctatggaacactattgtttcttaccctgctctaatacctacctgctactgcccaatgcttagttcaagcatcctctactcccggaatctaaggggttaagttgggtgctctttctcttacaaaagacctccatgcttacctctgttcttacactatacagtattataatggctagtttgcttctatgtttctgtgagttccttgtgcattccttgagctggggtctgtgttcatggtccctataaggctcaccatctagccagaatgtgtggcatatagtaaatgctcagtaaacatttgttatctaaaacaaatatatttcttgtcctaatactttccagagaaatagttgctcctatccagttctttctagtcctgaatttctccctcttctcccattccaatccctgcatcttgaatatattaatagcagcttcaaaataaccatgtcattccagggcaatgtggaatatatcctttacttctcttttaccttttcttttcttcttcttttttttttttttttgtaacatatctaataatgcatgtcctgaaggaattttcctttttttcttttcttttctttttctttttctttctttctttcttcttttttttttttttttttgagacagttttgctcttgttgcccaggctggagtgcaatggcacgatctcggctcactgcaacctccgcctgctgagttcaagtgattctcctgcctcagcttcccgagtagctgggattacaggcatgtgccaccacgctcgcctaattttgtatttttagtagagacaagatttctccatgttggtgaggctggtcttgaactcctgacctcaggtgatctgcccgccttggcctcccaaaatgttgagattacaggtgtgagccaccgtgcctgacctctgaaggaattttctaatgaggaaaaaaaatttataactattgttattcttttggaggttaaagttttaccttagtggtattatcctttaccatctggtaaaatttgtgcttagatttttgagttttgaagtgttttcattttattttatttggtccattttaggcattgtgtggctgctcaattaatgtaccaacactggatggaagaaacatacctatgtcagtaaatgatattgtgaaacccggaatgaggagaagaattattggatatgggctgccatttccaaaaaatcctgaccaacgtggtgaccttctaatagaatttgaggtgtccttcccagatactatatcttcttcatccaaagaagtacttaggaaacatcttcctgcctcatagaatgaagaactttgttacacatattttgataaggcactgaaaatataaaaggactggtagtttactgatgtagatgtgaattctgtataaagatgtgtaaattcttttgagggttcattaaattgcatgaatagagacgggtcaaataaataggcaaaagggatttttacagttagagataaaagagaaaaccattcactgtattttatttcatttctcctgattcagatatttttagtaatttgcttatatgtaaaagttgtttttgtggagtcagtggatatatttctaatgaagtgctagactatccaattacttaatttcttatacctttagataatcagtatgaaaagttcccatttataatggaaatgaaaattcttaactaaactatacatgtaatatgtatttctagaagagaataaaaacccaagtcagttattagatttaaatcaccttctgaaatgctgctatagggctggtatctgtaaaagaatatcctgatgcatctgtttcaccattttgatttttaaagtatgctgtagcatttcttaataacatcgttgtgatgttcttaaggcagatctttcttcataaaaaggaaagtaatggcaatttctctcctgtggaaatcccaattgcttgaattactgatattttagaatagactttttaaaatgccatatgtaattttatgcaagttgactatatatcttgtacttaataaattataggctcattttgttctctgctagtttaaagtaattcgtttaataatagatgtgtttttagaggaaatgctgttacttggaattaattttccagttatacagtcttctataacttactaataatattctatatgtactttatgtaatttccctaaaaagaatgaactaccactacactatggtgttaaaccaaaatatagggaaaataaacactaactgctgcttatggataatgttgcaactacttgttatgcatataaatattttactttttcacatgtatagattgcatttcttaggtgttttaattttttaaatatatttatgttttaaaaatttagttttgttttctgttttataactatagtgagaatgatgttttgaagcaaaatttttggttataaaatagttttcaggattatatatatatatactggatcctatcgccttttagtagaatatgaaatattcttttagaaatccaatataaataggttataatagccatattctttattactttattgagatataatttacatgccataaagtttacccttaaaatatataattcagtggtttttagtgatatttacaaagtggtacaatcatcatcactttctaattccagaatattttcatcaccccaaaaagaaatcctaaatccattagcagttacttcccattcttcccttcctccagcccctgaaaacactaccatctacttttcatctgtatggatttgtctgttctggacatttcacataaatagactcaaacaatatatggctttttttttttttggtctggcctctttcatttagcttaatgttttcaaggttcatctatgttgtatcacgtatcagtactttattttttgtgtggcacgtcatatggatataccacaatttgtttatcttttcattaattatgggcatttggcttatttctacttttttggctattataaataatgctgctgtgaacatttgtgtgcaagtttttgtgtttcaattctcatgggtatatacctaaaagtggaatttctgggagtaaccatatatttgagttgcaaatggaaaatgcttgaaaaaaatgccacagaattcagctaatcgtatttattactctaattcataaatgattcctctataactgtctctctgaatgacagttaaaactccctacagaagtgtgaacattacagaaattttctcacaagtctaaagatctagatctgaaaagcatcagtcaacgtggtgaatgatagtggtttctgttttaaacccatcattatttattgcaattttcttgattaagcattttctcccaggtaaaataaatgatttatagatagatatataataatctttggattaaaaagtttttttaagcagagaattattattctagtagtaaataaatttacataactacacaaaaccagtataccagtatctctcttatcttaaaggatattgacaatgctttagcatgtagtaactgctcagtttttatgtgttgaatgttgaattaaaagtagtaatgagtagagttttaaagttttttaatttattttttcaaattatgagagtactttttattttaaaatgttttctttaaattcaaccaggttcttggatagccggaatagttttgaagtactatagatcccataaagaagatgtttatcttccctaaaagaaaaaccacaaattgcttatgttaaaaaaaaaaaaaaaagaagaagacgacgaaggccaggcactgtggcttatgcctgtaatcccagcacttggggaggctgaggcaggggaaaatcaaaacttgagtccaggagtttgaaaccagcctgggcaacatagtaagactccatctctacaaaaaatttaaaaattagctgagcctggtagcatgtgctgtaatcccaactacttgggaggctgaggtgggaggattacttgagcccaggaggtagaggctgtagtgagccctgattgcaccactgcactcagcctgggtgacagagtgagaccctctctcaaaaacaaaaacaaaaaacaagtataagccaaggtgattaatggcctgctaatagaggtattttgtttggccagctcagtggtttaaaaactattttttaattagaatgcttttaggcaagacatggactcttctgttgccactgacctaccattatctattgcgttacataaagctgcttcacatgtttagttatgttgcctgggcctctgaaagcatctgagttagtcacatctactgtagctcatcactcctgcctattgttagccttccttggagacaaggagttgaaaatactcttgtttgtttatttttgggaaactgtcattcaaatagttatgatggataaaggaaattaatatatgtgattagactcagtaaatggctcagaagggactatcttcatattccaaggactatttacataacctcaaagagttaagactaaatatcattcttaatctaaaaataatttttatctactaacgtgtaatgtagtatactgcctatatgtctgacttcatgtatacatggtttattttttaccctttatggagaagtatagaaaaaaaatgtggtatgttactttcaaataatagcttaatcaaaatgtgagtaaatagatgaagttttatagagtaaatatttcaaccttttaaatttttttgtgatacttcataaaattcataaaacatttggagctggaaataatttttaaaatcccattttctagataaagaagtaaacccagagaggctaagtggcttgtctgtagttaaagagcaggtttgatgtattcgaaactcttctggtcattaaaaaataaaagaaaaaaaaaaaaggagagcaggctgggtgcagtggttcatgcctgtaatcccagcactttgggaggccgaggcagatggatcacttgaggctaggagttcgagaccagcctggtctacatagtgaaaccccctctgtactaaaaatacaaaaattagccgggcatggtggcaagcacctgtaatcgcagctacttgggaggctaaggcaggagaatcgcttgaacctgggaggtggaggttgcaatgagctgacatcatgccactgcactccagcctgggcaacgtggcagagggagactgtctcaaaaaaaggaagctggaaagggaattcttattctcagtgccatttttctccagtatgccattgatatcccctgtttctcaatttccaagactagattaaattcttttacagctcatttgctggccaagtgtggtggctcacacctataatactagcactttgggaggctaaggcagaaggattgcttgagcctaggtattcaagaccagcctgggcaacatagcaagactccatttaaatattaaaaagaaaagttcatttgcctatttatttatgtagtctgtgtaatttagcatatacatttgaaatatattcggtcatttaggaacatacaaagttataatttggtgctcactagaaagcttttgaaacattaattacaaaaacaggctttttctttttaaggatattaatagaagtaatagtccataattgggctgtgtccttcattagtttacaaatatatatgccaatgttattctcaaaatagtgtaaggccacatctgagcaaaaaacaagcatattattttaatttacataaataacaaatgaagatttttacaagtaaaatactattcaaatattaaattatatcattgtaaaaagaaaaggagagagaggaaagaaaaaaggcgagagaaaaagaaggggggaagaaaggaagaaaaaaaccctgcagattttattgagaagaaaagtttgtaatgacaaataacatacggaatctctacaaacatttgcaaatattgtaactcctcccaaactaaaaattcgttagtacatcttctctccagccgttagaattttggtttgtataaacttagttcttgaagttttttttttatactttaagttctagggtacatgtgcacaatgtgcaggtttgttacatatgtatacatgtgccatgttggtgtgctgcacccattaactcgtcatttacattaggtatatctcccagtgctatccctcccccctccccccaacccacaacaggccctggtgtgtgatgttccccttcctgtgtccaggtgttctcattgttcaattcccacctatgagtgagaacatgcggtgtttggttttttgtcctagtttgctgagaatgatggtttccagcttcatccatgtccctacaaaggacatgaactcatccttttttatggctgcatagtattccatggtatatatgtgccacattttcttaatctagtgagttttttttttttttaaggcatggtggtgtggccagagcgcagtagtgcaatctgggctcactgcagcctcgacctcccaggctcaagtcaatcctctcacttcagcctcccctgagtgactgggattacaggcgtgcccctccatgcctggctaatttttgtattttttgtagagatggagtttcaccatgttgcccaggctgagccattattaattgagataattttaagaagaggaaaccagaggttggaaaaaaggaaatgagagtaaagcgaatggttgaggaagatgagaaatttttgatgcagacttacacataagaaataaagccaaggccggttgtggtggctcatgccagcactttgggaggctgatgcagacagatctcttaagcccacgagttcgagaacagtcagggcaaaatagcacaactccatctctacaaaaaatacaaaaattagtccagtgtggtggggcactcctgtagtcccagctacttgggaggcttaggtgggaggctgatttgagcccaggaggcagagattatagtaagatcacgccattgctctccagcctggcaacatagccagactgtgtctcaatcaatcaatatagccagaggtacaaaccactgctgctgtttttgctaaagggatgccattgaaatggatacaaaaagcctggatgggaagtagttttgtaagatgaatttaaaatttatataataatataatttctatataataatataatataaattatattatattattatataactttctcgagctcaagaaatatttattttatttatttatttatttattatttttgttgttgttgttgagacggagtcttgctctttcgcccaggccagacctgcagtggcgctatcttggctcactgcaagctccacctcacgggttcacgccattctcctgcctcagcctcctgagtagctgggattacaggcgcccaccacagcgcctggctaaatgtttgtatttttagtagagacggggtttcaccgtgttagccaagatggtctccatctcctgacctcgtgacctgcccgcctcggcctcccaaagtgctgggattacaggcgtgagccaccgctctcggcttagttatgtttatctgagtcacttaagtaaaagttgtgtaattgttttttatcttaagtatacattttgcatctctgtgactggggatgaagaggttcaagaaatgagattggccggatcaatggctcacgcctgtaatcccagcactttgggagcccgacgtgggcagatcacttgaggtcaggccttcgagatcagcctggctaacattgcaaaaccccgtctctcctaaaaatacaaaaattagccaggcgtggtggcaggtgcctgtaatccctgctacttgggaggctgaggaaggagaatcacatgaacctgggaagtggaggtagcagtgagctgagatggagccactgcactccagcctgggtgacagagtgagactccatctcaaaaaaaaaaaaaaagagagagatgaggttaactgaaaatcataagatctgaaaagtttaaacattaggaatgaggttagactttttaaaaatcgccttcttgatgtgcctattatgtttaacaaaccaaaaatgaatttgcaagcattttattgaagctatgaaaatgggagatcctgaaaaatttctagtgatcaaggaattgtaaatcatatagtatttattattactaattaaatttactcttatcctctttatttaatacaatcttcattttagtgaatctaaaaactgtcttcttagggttctgcctaaaactattttttttcccttcacaacttaaatcctaatcgttttcttatctcagtgttttcagaaacatatctgcttcagactgggaaattatattttactatggcttttatacattacactcccttacttatgaaggaaaccttgaaaattggcacagctaacttcagagtagtaattacacaataggaatagttagacattttatacttttttcccagaatattttatgtataaattttggaagaaattaatcagatgttaaaattgaaaaccaggcttaagatggggcttagtattatttaaaattagttgctaggttatataggcttattctcattaagtttgaagatggtatataaagttatatcacttctgttttggcaccaaaaaaaggtagacttatatatcacaaaatttatacaatataaactgtattatttaaccaaaataatgtaacttaaaataagtcaaacattttaaaatgaaattgatatcttattttgatttacagttagaatcttgaggtgttgcgtatgagaaatgaatttattttacttatttatagaaatgaggtcttgctcagtcaaccaggctggagtgctgtggcaccatcttagctcattgcaacctagaattcctggcctcaaacaatcctcctgcctcaacctcccaagtagctgggattacaggtgtgagccaccatgcctgactcagaaacttatttattttctttcagttttcaaattttaaacaatgacttacttaatattatgaatagataccagtcatctcatttaataatttgtcttaataaatgtgatgggtttgaatattaagaagatgaaccattagccaggaattctaattttatgttgctaagagattttaaaactttaccaatcttttaattaatataaaaatattttattttttacttgtattttcgataattgtaatggatttgaattatttcaagacctatatgtagctttaaaaaaaggaatatagaccatatatactatgtaaatatcaataatttctttacataggtatttgatttaaaaatgtgttttttgttcttatgaaataacattttattaatttttttctctttagtcagggtctcactctgtcacctaggctggagtgcagtggcatgattatgactcactgcagcctcgaacttctgggctcaagtgatcctctggcctcagcctcccatgtagttgggacgacaggcaaacaccaccattcccctatactttttgtattttttgtataaaccatgccccaataatttttgtattttttgtatagatgaagtcttgccatgttggccaggctggtcttgaactccagggctcaagtgatctgcctgtgcccatgggcatatcccagcatgagcccacgcctataatcccagtactttgggaggccaaggcaggtggattgcttgagccttggagttcaagatcagcttggccacatgacaagactctgcctctacaaaaaatatgaaaattaaccaggcatggtggtccacatctttggtcccagcaacacaggaggctggcaccagataattgcttaagcctgggaaagtgaggctgcagtgagttatgattgtgccactgcactccagcctgggtgacaaagcaagaccctgtttcaaaaaaaaaaagaaaaaaattttttttcagaaaaggcactaaatcaaagagcaacatataattctaactagtaaatgtagttagacttaaatactttaatgttaaatatatctaatgttaaaacattttattgtatctagaggcacatgaaagaaaaaatatttcaaaattactgtgaatgtgtgactattctgaaaagattgaaccaagtatcttatgcctacttatatattgctgtaagtacttttttctttacattgacaaataaaattgtatgtatttactctgtaaaacatgatggtttgaagtatttatacattgtgggatttgtaagtatttttaaaattcgaaataaaggccgggcatggtggctcacacctgtaatcccagcactttgagaggctgaggcaggcggatcacctgaggtcgggagttcaagaccagcctgaccaacatagagaaacctcatgcctactgaaaaaaaaaaaaaaaaattagccaggcgtggtggctaatgcctataatcccagctactcgggaggctaaggcaggagaatcacttgaactcgggaggcagaggttgtgttgagccaagattgtgccattgcattctagcctgggcaacaagagtgaaactccatctcaaaaaaaaaaaaaaaaaaaatcaaaataaaaaccctgcctgcttttgattttagtttatgaaatactaacttcatgagagcatagagtgcaaacacatagttcataatcaacattttcaaatacgtggcccaatatttttgtatagtaattgataattttgtgaagtagttatttgttattactacttcatgtggcagatgaggaaacagagattcaggcattcttaagtcctctatcccagatcacacagatagagatgcaactgagattcacgcccagattgtgattttcgacctgctatttctactgttcatggctacatggttgtgaagatggtagttgtcttcatttgttctgcctgaaaaacctgaaccaatccttccatatccactgaattatttaggataataattttaggagattgacagaagccaccaatttctttcaatgaatagtgacaaattcattatgatgccttgctgttgtcagtgtcagaatttttttttgcatagggcaccaggctatgctggggtcacagataagaatgatctttataaaggccttcataaacttgagaattgaggacataatacataaaatgcatgacagtggaaatgtaccatatgccctcctcctatgagaaatgtgttttctaccactagtagttgtttctgcctaggtatcatttaggggcagaaccaagaatatgaggttattttttccttttgtctaaattgtattagttttatgatacccaaatacacctcttttctcctgctttgcacaaattaaggaaagatggggaaatttattattttacattaatttgatagacataaaataaaaattcatttctcctctgtgccaagatctgtgttagatgtaatggtgaatttaaccaacctgttccttaccctcatagaacttattattattttttatatttttgagatggagtttcattctgcccccatgctggagtacaatggcatgatctcggctcactgcaacctctgcctcctttcaatacagtatgttttaaaatttttttcttttgagattcaggggatacatgtgtgggtttgttacatggatattttgcatgatggtgaagtttgggcttctagtgtacccatcacccaaagagtgaacattgtacccaataggtaatttttcaactcttaccccattcccacctttcctccatttggagtccccagtgtctattatctgtaggtccacatgtacccattatttagctctcaagtattttattttctgtttctgaattatttcacttcaaataatggctttcagctccatccatgtggctgtaaaggacatgatttcattctttttatggctgtatagtattctatgatgtgtatataccacattttcgttgtccaatcaaccattgatggacacacttaggttgattccatgactttgctattgtgaatagtactgtgataaacaaacaagcaccagtgtcttttttaatataataatttattttcctttgggtagatacccagtagtgggattgctaggtttaatggtagttctatttttagctcattgagaaatcttcacactgtttttcataaacgtatcaacatttatcagttatcaaatcacctttagttagttgttaaacaagtatttactgagcacactgaggctataacattgtaggtgctaaagatacagtcctacccttaaagaccttacattctaatcatagaagataaacactaagaaacattacttgcattaaaaaacaagtaagtcatttttttgaataatgataagcattaagaaaagaatgataacggcatagaaactgactggagggggaagaagtgtgttactttttagctagagtcatcaaagacagcctctctggggagagagacatttgcattcagcccttaatgattcaaagcgggcagctgttggaagaagatttaaggaaaaaggaacagcaatgacaaaagtcctgagatgggaacctttattgaaaagcagaaaaatatataatttacttcctaattttcaaatcctgttgatgttatgtttcctaatacatatcaaagaggcagaagtagatgtcagataaagaaaatgggactagaaaatgtcttttttttttttttttttttttgagatagagtctcactctgtcacccaggctggagtgcagtggtgtgatctcaactcactgaaacctccacctccgggttcaagatattctcatgcgccatcatgctggctaattttttgtatttttagtagatacggggtttcaccaggttgcccaggctggtcttttaatcttaccccattcccacctctcctccatttggagtccccagtgtctattatttccatctgtaggtccacatgtaaccattatttagctctcaagtatttttattttccgtttctgaattatttcacttcgaataatggctttcagctccatccatgtggctgtaaaggacatgatttcattctttttatggctgtatagtattccatgatacttggcctcccaaactgctgggattacaggtgtgagccattgcagctagccaaagatatgactagaaaatgtcaagtgttggcgcctgatcctggctcttgctgtctatagaggccatttcttttcaggcttgtgtttcctatttgtaaatggagaatacttatcatatgtacctcttaatagaatacagttctctataaacaatactaggtatggatgagataatgttgaaagagaagtttactcagacattttaaattatgttacattaaaatgttatctttgttcaaatttttttaaatgaagattttaaaagacatatgattctatatttctcaggctgctgattcatatattgatagtctccctcatactcttaaattttgaaatgctttacctcttgaaaatgaaaataaaaattaaattacagataagattcataataaaaattttaaagatcatgggtatactacattaaaaatttatttcatagcattggttctaaactttttaccccaaataggccttttattacattcttacccccacccatattaaattaaacttttttttgtgatgaacagactgtatttattaataattattatatttatatttggggatggctgttagaattattatatttaggccaggcacagtggctcatgcctgtaatcccagtgctttgggaggctgaggcaggaggattgcctgaagtcaggagttcaagatcagcctgggcaacatagtgagaccccatttctacaaaaaataaaaaaaattatccgggcatggtggcacatggctgtggtcccagcgacttcagaggctgagacaggaggatcacttgagccctaggatttgaggatgcagtgacctatgatcatgccactatactccaacctgggtgacagagtgaggccctgcctctgagaaaaacagaactattattttaatatatccaacataatatgacagctagtcaactactgataaacaggaagtgaacagctagaaacaaaaaatgtgattttatctttttgtacagacaaggtccttgctatgtcacccaggctgatcttgaattcctggcctcaagcaatcctcctgcctcagcttctcaaagcgctggcattacagtcataagctatagcacctggctaagaatgctatttaaaaaaattcactctataacctgttaggtgtgtgattcccattaggtgatttccaatactgaaagtagcatcacttatctatattacctacctcctttgtagtctccttgggatgtggagacatcagattaggagctactagccttggctttgattataattttggtgacggccgttagaaggagatgacattagatgaggtctctccttctgtagacgaaactgcctttagagatcataccagagttcaccctggaaaatagactagagtaaaatttaatttgttagtgtgtattttttaaaaatcatggactagaagtttgtgttgttaagaaatttggaagtgtcggcaagtatcctaacaaaaataaaaaaataataatgttagggtagaaaaaaaaacttgatgttctttttaatgttaagaaatcacagtaaatgatgcatggtattaaagttaggtagttgactattttacaatgctttgtttaaaaaagcttgttacaaagcttgtttacaataaatttttaaatatccatccactttataacatagtataaaatttaataaccacaaacatttaataaataagtaaaactactctgaaattcaacagaaataaaaactctttaggctattttctagaactatgtaatatagagagcattcttgggtgtgtgtgggggttgtttttgttgttactctttgccagtaagaatacattttacgggcaacccgctcggggccccttccacaccgtggaagctttgttcttttgctcttcacaataaatcttgctactgctcactctttgggtctgcactatctttaaaaaaaaaaaagaatacattttacagtgtcatctactagtttacattgtgtgtgaatgtatgtgtatattagtttaagccatatgaaatcacagatactcaacttttttgatctataaaagtggcaatatgaaattacctatcttttacctatgaaaataataatttcatttacatatatgtatataaaatggaagtttaataaaccattacttaccattcctagatagaataactctgatgttttaaaattatactctagtttattaatttttttctaattgcatcccacggcatttatttcatgatctacatttgtgaaacagctccacagtttgaaaaacactcctagaattctcataaggatataaatgtagtaattgttaaattttaaaacttaaatgtcaatttgtttaaattcatttaaaaactactgactggaaaatttttactcattatttgattgttggaacagcagtagatatagctatatagctatttttgggtcataagacaaattctaataaacgaccattattttgattagtttatagatgagtttatttcccccttcaacttaagataattatagataggaaaagtaaatttctgttgaatttgccctattaaattctcatgtcagtggtgacaataacattcagatttccttcaaattctgtctatatagtattttagcaaacctatgctagtaacattagaaaaaaaataaatttactaaccaaagactttatgaaggtcatacatgaagaaatgggtgttttagtaagaaacagaaatttcttaagcttctcattagatttctttagattttagttcaaaatagatttgagtgagtttatttctgatgcgttgctttaccctgattacagaaaagagaacttctaaataaatcacatttaaaaatttttaaaaattcactggggctgggtgcggtggttcatgcctgtaatcccagcactttgggagggtgaggtgggaggattgcttgagcccaggagttcaagaccagtctgggcaatttgatgaaaccccatctcttcaaaacacaaaaattggttgggtgtggtggtgcgcacctgaggtcccagctactgggaggctgaggtgggaggattacttgagccctggaggttgaggttgcagccagccataaccacagcactgcactccagcctcggtgacagagtgagactctgtctcaaaatgaaaaagaaaaataaaaaagaaaaaaatttactttaaattttaaaataagcttaaaatttactttaaaaaatttctactcagtttgccagcatcacaaccattcctctaaggattatatatgagaaaacaaaacaccattaaaagtatctgactaggctggatgtggtggctcacacctgtaatcccagcactttgggagactgaggcgggcagatcacctgaggtcatgagttcgagaccagcctggccaacatatagtgaaaccccgtctctactaaaaaaatacaaaaattagctgggcgtggtggtgcatgcctatagtcctagctacttgggaagccgaggcaagagaattgcttgaacctgggaggcggaggttttagtgagctgagatcatgtctctgcactccagcctgagagacagagcaagactctgtctctcaaaaaaaaaagtatctgactaaattttattttcatattgtttcttaattgtatggttatcatcagtgaccacaaatataatgtagaggagagttattcaatggctttcatttctaagcattcagtgtaatcttaatgttttaggagactgtacatagtatctatgtgtagcctgttagaatccatagacctttaggtaagtatcctctttattattgctatttcagtacaaagtgtgcttctgggatagaaataaatgggccacttaaatacatctctgaggcaacagccaagaattgtctaataattgtttttataagtaagttagaaattagaaaattaatttgcattaagtggtgtatgtgcatacatgtatatttttcaaagccatcaaaatatattttcttttcttttttttaaatatatttttaggggctgggcacagtggctcatgcctgtaattccagcactttgggaggccaaggcaggcacatcacctgaggtcgggagttcgagatcagcctgatcaacatggataaaccctgtctctactaaaaatagaaaattagctgggtgtggaggcacatgcctgtaatcccaggtactcgggaggctgaggcaggagaattgcttgaagcagggaggcggaggttgtggtgagccgagatcgcgccattgcactccagcctgggcaattagagcaaaactctgtctcaaaaaaaaatatatacatatacgtatatgtgtgtgtgtgtatatatatatatatatatatatatatatatatatagagagagagagagagagagagagagagagagagagaaagagacagggtctcactatattgcccgggctgctctcaaactcctggcctcaagcaatcctcctgccttgggcctaccaaagttctcagattacaggcgtgagccaccacacctggccatgaaaatgtattttaagaaaaactaaaagcttctttttagaagaaaaataacagagtattagttgactgaatatatttggaagatattagacctattaggtaaattgttatacatattaagcacctcaatgtatgtggttattataaagaagtatgtttctttttcttatttcttacagaacacggaaggaagtcatagttgtttcatttattacatgtattacctcttttaaagaaataagcacctataatagtgtttggctcaataataaacattagctattattagtcacagcatctcttcatttgaaagtggacttagatttctggtttcagaattcagttgccagaatttattcattcaatattaattaaaaatttaagaacaaaccatatgctaagtatgtttcatgagaatttgagggtttctggtttctggccaagataggaaagcagcgggagtggcaagctccctgttgcataatcagccctgtagaaactatagagctagatggaagctaggaatccttgtagagatttaaggctgttttgaaccattttgagtgttagggtaggctggtgagagggttagtcagaggaaagctttttaagtctgcccttgactttttccagaattaccttgtaacagatattgcctgcagcttcactgccaaaattggagacaaaagctcagggtgtgcatgctgatactgcagagtattatcagggcagtgcaaaagccttggtagcaagaagtgttgatggaaacaaatgtagactgacttgtagtccttggatattcatttctcctcctctttcctgtccaaaacccttgggctggtgtattcctctcccaaggaggcttctcactaaggatttaaagtaaaaactctgacacaggagttgcctaatgtataagcagcaaaccagaatgatcagtagtatttacgtggtgcctggggttctgtggctttgggctcatctcccacgcccttcaactcactgattcggccagggtccttgttgcagccccttcctcaatttaccttatcagctagaggatcaaggggaagtggccaaggtaaatagatatcagaccatttttctttcattcaaagtggacaagtgaacggccataagttctacagcctagggggaatttcctgttaccatgcctttcagggccacccatgagtgtagtagctgtctacttctggctgttccagtgtaatgtgcagagcaggcctgaactttttctcttttattaactagtcattacgtaggtccagtcttgcatatatcattcatattaaataatggaatgcatgtctcaacttgaagatttcgttgaggagtagctccagtcacatcatcacttggcagtctatcataaagttgtcagtctctcccagaactcaccagcaagtcaggagctgcttttcaatgggaaaaagcctgttggcagcagaggacatggcttactccaaaaccctaggactctgcacccggattctcctattgggatttgttagaagctccatatagctatatctgccacaacacttcagatactcttgagtgaattttgaatgagcagggaactctcaggctgccatgttgggaaagtgctttctaggagttccatgagcaaagggcacagtggtgtttaggaacttctagcactgtaacagagctaaagtatatcatttaatttgggagagaggtagagaaatatgtggggaaccagtgctgaatgtatgctatcctaggtatttatattttatcctgtaagccagtagtttccaaactgtagggtgcatcagagtgctgggagacttggtaaaacatggattgtgggtttggggtgggatcagagattttgtatttacaaaagttcctgggtgatgctgatagtgctgatttgggaactacactttgagcactacagaaaacaagtagttttaaacaggagactaacacaatcagatttaagttaaccaagatcactcacaggtagacgtatggcagattgataggaaagatacagcacaggagaaataaggctagttggaaaacaatcaaaatgattgtgttaagaaagtaaagggcttgcgttaaagttagcaatagaattgagaaatagggaaaaaacctcatttcaatgagtatttagcacttagtaaatgccaggtactccactttgaattttgatgtctctctggattttttcaaagcatctgaaatcttggcagagaaggaagtactataatggcagagaacgaagtgctataatggccgagaatgggataaactttctttgggggaacataaatgtgatttaatccctagaaagaaaatgtttgtaacaaacttagaaccaggtatcagcaaaactaaatcatattttaaccaccacaggatagaaaaattttagattttctatttaagaaggaagaatccattttcaccttctaaatgatgctgaatgacaaaaagttatggttctatagttttatattgaattatagaattatattactcttgtatataaaagaatcacatcattcagtcaaacacttagcttttggtaatatatttttttaaacaagtgaggaaaacattgcgtaatgctggtaaatgacttcccacaagctaatgggtagtagagcttgaactgggtttactcagtgctggtctggtgttctgcagtaaccacacaattggttattgccaatggctaaaaataaaattcaaacttcttcctagtatttatgactgtttgcaatctgatatcaacttaccttttccgttttacatattgaaactccaactctaggcttgtttgtaagataagccatacataaaccatctacttatgtttagtctctgcaagaaagaatgcccaacaatttttctcttcatggggttcccattctactcccatcttctatttgtcaaaatcaaggtccagctcatgtgtgagacatttctgatgtttttgagaaccagtcattttcttattctgctcatctccttgtagagcttattacaatctgccttgcataataataattatgttaatcttcctcattagattgagcctccttgaaaatggacttttcttcccccacatttaggtcagtccttatagaaaacaatttttcaacaaatgtttgtctaatttatgctgaataattgaaatagtaaacattttgtgaaattaatttgttcatatttttatttaagaaagacatccaaggaggcagattatataaaatgtttttgaaacacaatgaattggaataattttagaaaactagactattctgaattaaatattaaatacagtttatcacagtgatagtttagttgataacttgaaatattcatttgtcaagtaaatgttcttcaggactcgaattaataaacagattaaaaatgtgattagcatgccaattgttgaaatttccaactaaacttcaaaatgattgcaagtgtttttaacatttctcttataacttatattcactatttaaataaacttttcttagtccaaaatgcttgaattagaatattgtcattcattatttttgaacaacttaaatatatgccatgttctgatagcctactttcaatgcttaagagtacaatgaaatatgccatatgaaaattatgataaaaaacagagcatgtacttgatttagaagatactacatccagcctgggtaacagagtgagaccccccatctctacaaaaaaattaaatataaaaaattggccaggcatggtggcacataactgtggtcccatgtactcaggaggctggggcgggaggatcacttgagcccaggagctcatggctgcagtgacccatgtttgtgctactgcactccagcctggataacataaagcgagactctgcctcaaaaaaaaaagaagatactacaggatcttagagtatgccattcattttcattacgaacatctattgtgcaataataatattttaaatcatttattatgtggtaggtactgtcacctgatacacaagtatatttacagtatgttttatgcaatatttattttagctataagaactaaatatctttaagtgtgaaaaattaaccgagagatgaaaagattcgcccaagattgtaatcgattaccactgtacaaacagcacaatgacttgaaccaggtctcttggttcaatctaaaacttgtgctcttaattggcatactgaacagcttccttcaattataatagttgtggaaatgatagaaaagtgacacatctcatcatttcaatttgttaacttgaattctgaaggaaaagtagaacgcagaaggcccaccaaaaaattttacttggattttcacgttatctctagtccatataaatcaacattctctgcatttttgattggcagatataaacttcagccctgcttctggtaaaattacaacaaaaccttaattatgttatattgaactattagggttatattttaatgatggttttcaggtcaaattcttaatttaaaaaaatgtactgggtaagttcagtgttgtaaaattaattaccaaatgtggcaaaatatttttggataacatttactagcattccttttccagtataactgaggaacaaaatgaaaaatatttggcggtttttgggaacctacactttgcatttatttcaagtttaaaatggagaaaattatctcattaccagctaatgactttcagggtttgacaatcttttacctcccccctaccccagcaaatggaaggaagattgactccaggttttatgtttttggtctacaatagaattactcaaaaatttctactcttatatgaaatgtttttttcttaaagacattatatttctttttgtcattgctatatcttggccttaaaattactgtaatgattatcttcaatagctttaagttattcttttcattgaaaatatttggattgggtgcagtggctcatgcctgtaatcccagcactttgggagaccaaggcaggtgggtcacgaggtcaggagttcaagaccagcctggccaagatggtgaaaacccgtctctactaaaaatacaaaaattagccgggtgcggtagcaggtgcctgtcatcccagctacttgggaggctgaggcaggagaatcggttgaacctgggtggcagaggttgcagtgagccaagatcgtgccactgcactccagcctgggtgatagagtgagactctgtctcataaaaaaaaataaaataaaattgtttaactctatccagtattttgggtctgtataacagaaattatttgttgaactctgagtcatcaaaggcttgtatgtcaaccaattactattactatttttcagttttgcatacagtgcttgaagattaaaatgtgtgactttgaatgtggctgtgcgttaaacctcgtgcagtttttccatatgtatgttattgtagaactagtgttaaattagcttactgtccacatttgttcttgtctcttcaatgtttattcaccataaccttggagatgtggagtaatctggagtccatgccagagggtttcctctaagtatacacagatgagataatgcatgtaaaatattgaggactaagccagacacacagtagttgcttgctcatggagcacctacatattcttattattaaatttattcttccccctctatcaccccacctccttttcctctttccattttccatttctgtatttccaattactcataataaaatttatttgaatttcagctaagagttatttcctcccccatttgccaccttcagttgttcattgttgccatgcaactataaaacatgctatctttagtccctgggaaaactgcatatggtttaacaaatcctgtgtttattttctcccaagtatttgcttactggatacatacataatggagagtggggcatagagggaggtgatcagtgtgtgtttcttcagaactcctaatgttacatgttgtaattagaggctatatttgctgggaaaaacaagttagtaaatttatcttatgattcatttatagcttcttataaacaagacaatttcttataaacaagacaatgtcttataaataatattgcttttggcagacaatcatagaatttttaatgactcatacttgactttatagttgatactttaaggttgttgggaataccaaatgctgagtggaaatattgtagattgataatgtgggttgaactctaagcctagatataaattgaagacctaatacttttaattaattgtttttaatttatcttaagtagtaacaaaggttaatcaatgttatccaattatatttactgatatctattatatatataatactatgggagaatctggacaggataccaaagaggaatatggaacatggtttctatcatcaaggacttatcttgctggatttcataatttaccgtatatgaaaaaagtcagtatatatacaaacaaaactttgttgtaaataaagttttttacaatagatgtgtattaggaactcagaaaaatgagagactaggtgggctgatatgccaccgtttctatttacatctctagatccaacctccaaccctctcctctctcctggaggcatctgcagcctgggccatatcagcagagactccattccctctggccttgggcttaattcaatgttgagtctaggtaggtaatccgagggtgggactggaatgaggtcggtaggcacatttgtggaacctgggacaagaatacaaatagagacccagataccataagcctaactatttaaaactgcttgataatcaactgtcaaataatatatgttttatacttctattttggccaatatatcttcatagtgatcggaatggataagtccaaatttaagtgatcggaatggataagtccaaatttagagttctccaattcaatagttccacactggaatatagggatgtgggagaaacaggtctctgcctgaagcgtaccccattctttttctatccagctctgttctgtccttccctaatccccactttaccctggccaaaagctgctccttagccatctctcagacatagggatgctggctacctggaccctggtgaagcctatgcacattctggaggcaggctgggggccacttgggcagggaaatcagggatcctgggtgtgtagaatgtggtctagaaaggagggcatgaattctgggtggccattcccccttgcccttgtgggctccctaccttgggtggtatgcagctaaaggaatgccagagcagaacttctgcccagctctaagggtaatattgggtcaaggtattaatttccccaagtgctttccttctagattgccttggcctacatgtttccttcaagcaaatgtcatagctcctcttaaaatgaactctctctacagaactttttaattcctcatgtctttggatttggggataaaaacagccctgggggccgggcgtggtggctcatgcctgtaatcccagcactttgggaatgcaaggagggttgatcacgaggtcaggagctcgagaccagactgaccaacatggtgaagccctgtctctactaaaaatacaaaaattagctgggcatggtggcgcatgcctgtaatcccaactacttgggaggctgaggcaggagaatcgcttgaacctgggaggcggaggttgcagtgagctgagatcacgccactgcactccagcctgggcaacaagagtaaaactctgtctcaaaaaaaagaaaaaaaagaaaagaaaagaaaaaaagaaacagccccggagtactaatattatgcttactctctgactaccacctgcccagtctctttattaaaccttcaccaaataccttaacttggatgtaccatttgtttcctgtgtgagcatgcccaatacagctggttccttaagtgagattttacagcaaaagtgaattcgacatagccttgaggggaactttcactttctaagtaagaaaaaacagaatttagaaattgaaagggcacaaaagattatagaatccaacctttccaccctatgtcaatacactggcttcttcctttgatattttgacatggctgaaagatattcttctctttgaagtttttcttagtttcacaccttctggtgttctgtcacatgctcgcagatattgataatgaatctgccatgtaccttatgatgattcacttctcttcctacttttctttagtcaaatttctgtgagctctttattcatacaatgcattgtgaagtcattgtgctttcacttgatgggaatgcatcatttgcttagtattataggttttctcttctcttttctcattagtccaagacaaagtaatactatttagtgctatagcaatcataaccatgaaggcaaatttgagccctgaaactctgtggtagtatcctgttttcaaagagttattcagatgaaccagaatatattacattactttttggggaggaggtggtaaaatatgtacattatcttcattgaagtggtttatcactctctctctctctctatatatatatatatatgtcagattttaccaaactgtacacctaattttttaaaaaaagtcagtacaggccaggtgcagtggctcacacctgtaatcccagtactttgggaggctgaagtgggaggattgcttgagcccaggagtttgagaccagcctgggcaacatagggaaatcccatctccacaaaaaatcaaaagaaacagaaaagtccatacaattatgtatcaattacaaatttaaaaatatttaaaaagtcatttgtctttttcattcttgttccgagtaaccagtgctgttttccaatggttaaatgatacaatgtctttattacaccagctcctgagagctgattgtgtacaacattcccaactctgtttagaggtgtcatgtagatagctggaactcagccatggtgaagtatttacacaatgaaaattagcaaaatcgaggctttttcatgaatagctggttaaacgattaccagcccatcactagctgttaacataaataaacaaagactcattgcagtcctataatacatatatatttttgacatggggtctcaggttgaactcaaggttctggactcaaggggatcctctggcctcagcctctcaggtagctaggactacagatgcctgttaccacgcctgacagtccttaattttgtgtgtgtgtgcgtgtgtgtgtctcactctatcacccaggctggagtgcagtggcatgatctcagctcactgcaacctctgcctcccaagctcaggcgatcctcccacctcagcctcctgaatagctgggattacaggcatgcaccaccacacctagctgattttttttttttttttttttggtattcttttgtagagacagggtttcaccactttgcccaggctgctctcgaactcctggactcaggctatcctcccgccttggtctcccaaagtgctgggattacaggcgtgagccaccgtgctgggcctcagtccttagtctatatttgaaaattttattttattttttatttttttgagacagtctcgctccgttgcctaggctggaatgcagtggtgagatctcggctcactgcaacctccacctcccgtgttcaagcgattctcatgcctcatcctccagagtagctgggactacaagcgtgtgccaccacgcaaggctaatttttgtatttttagtagagacagggtttcgctatgttggccaggtcctggcctgcctctgcctctcaaagtgctgggattacaggtgtaagccaccacgccaggcttcagtccttaatttttaactgtgtaaaagaattctgagaccaaaaagtctaagaatcacttggtacagtgattgcttatctatggagcgagaaagtcttactaggggaaaaattaaaaaaaaaaaaaaaaaaagggactttggacttccagacactcgaccctatcaaatcttttgcagattcatactgttgccttcaccaaatgccaccactgccattctcccatgggggtcattgttgacccagtctttcccccaaagaccaagagggtctggggttgaatgatgagcttcttcttaaatttgaagagcccaaaggctgctaggaaggaaggggctgcaacctcccctagcaaacaccaaagatctatcaccttacgtcctatagctacttgtggacaaaaaatggaactttaaggtactgctaggaaaagaatggcatcagatcaagttttccagataatggattccaactccagcaagtgggataagaggttcatgacacaaatatatttgtattaggtgaatcaatcaccaggataccaagatcggttactttcacaaactgctctgaggcaacttaaatacggaaggaacttcagagccagctcttcggctccaggctcctttttaactacttattgtggtgtggaaaatatcagcttgctgaggatttatcatcttaatagagagctccttgggaaggaaaagggtgaaatttaaaaaaaggatcttcattaaagaatagggagttgattatgttgcagaatcgtatcttcttgttttgcgacacgttggaaacataaactttagagctttttcatctccactgcacagaggtctgattgcttctgtttaaaaatggggatctgctgatggatttcagccagcttcttcaggtctatgtctgaatacatgattgtttcttccttgagagccctagcagcaaaggttcactacagtgctgtgtccccaggcaacataggaggctttgtcatcttgggcaggagaatgtggccacatacacctgattatcaagagcctgaagcaattcccagtgggctggtccagtggtcaaactgaaagcccctggataaaccaacagctggcagcctttccgtgtgtagatttgtgcaagctctgcaaaccagtgtcatagcagatgccccgactcattctgcagtaaggagtatcaaatgtggagaaactgttgcctggactcaacattgtggattcttgaaacgtcatttttccaggaacaccagtgttaagcagatggacctttctgtgctttactagtaaagttccatgaggtgcaaacacagcataggtgttatctaatttcccagcatcctcttcagggatggaacctctagtgaggttgtattcctttgctacttcagaaagcttctgtgtggatttaccaggaattttcgctgcatattcaggaaaatattttgtgccatatggagaattaaagcattccaacaaagaaaccattttggctccttgcgttgctgtctcccggacaaggctacaagctcgagtgttgttatctgatttgatgaagaaacttgaagctggatgagggccaagtggaaagttgccctggctctcctgggaagcaacagcagcagcactggctgagtgcaggtgtccctgtattacttttctaagtcacagaaacataaaacaaaaatgttaaagttatcctaaagtttttttttttttttcatctcgctctgttgcccaggctggagtgcagtggcacaatcttggctcactgcaacctccgcctcccgggttcaagcgattctcctgcctcagcctcccgagtagctggaactaccggcatgcgccaccacgcccgggtaatttttgtattttcagtagagacggggtttcaccatgttggccaggctaatctcgaactcctgacctcaggtgatccgcccgcctccacctcccaaagtgctgggattacaggcgtgagccaccgcgccggcctcctaaagaattcttaagactctcctcccccagtacatctgctaaccttaagttgagaaatatggattttcgggactgaattgatgtgagaggtgagggaagaggaaaaatcctgatacgacgactccacaatgtctggtctgggagtgcttggtgatcctattaactgaaatcaggagtaaaaaaaagaaaagatagatgcaggagaaatgatgaggtcagttttgttcagtctcaatttgggtttcctacagtacattccctttctggtagaataagctggagttggagacatttggtagacaacaacgtctgtgaaaccgagaatgttgatgtgaccatacaggaagaacatgcaaagctaagtaagaagggaagtttgtcgaggaaaaactgtcggtgaatgcaactcctggagactagcagttagcaaggagcagggtggggacggggagaggagaggtaaggaagccaaaagaggacaaaatttaagaagaatgaaatgggcaacgcagaccaagtaagataaaaacctaaaagaattacttgtatttggtaattaagatatgatagtgatttcactccactgaaattgcatagtaagtgaaatttcagtagtgtgggggcaaagtctgatcacagtgcttctaagagcagagaagtgaggaaatttcgtagctaataattcaagactgttttgctttgttgtaaaaagcgtagttggaggggactggacttgaaaacaatgcaataaacgcgaggtagggaattgagggaactcacacttcacaccgaatggcctcaattttctttgtactatatgaggcaaggtcctctgtagagactaagaagggcagagctggggcaaatggctttggaggcgtgctgaatgttgggagaggaagcagcccaggaaataggcaaaagggaaactcagaggtgccaaggacccggctgagggggtttatgaatacaacgtagcaccaagctcaaggttatgtgactttctcttccaattctgccctgcagagcgtaagacgcagaaaatgcagacgaaggttgacttctacttaaatccctatccccgaaagtccagacgtacggacccgaaggcctgtggccaaatcatgcgtgggtgcctactacagatttatgaaaagcagagaagggccagcgtgtttgccttctaaggcgtattgttctgtagcgtcggcatcctcaggcgttcacgtaaatagagccattttttacaaggagtagggataaacctggtgataggatgagggactacgtaactttctttctctccagatccatcccgggggaggctgggcgggcgggcggctgctccggtccaggggtggaggtcggggccctgacccgacgcagccaggcggaagcgcggctgccattggaggctgcttttacctgcgcggggcccggggcgcaaagtccgaggcgccggggggaggaggcggcggacggcagcgcaggtgggcccgcgctctcggccctgcaagatgcccctgaagctgcgggggaagaagaaggccaagtccaaggagaccgccgggctggtggagggcgagccgacgggcgcgggcggcgggagcctctcagcgtcccgggctcccgcacgcaggctggtcttccacgcgcagctggcgcacggtagtgccacgggccgagtggagggcttctccagcatccaggagctctacgcccagatcgcgggcgcgtttgaaatctcgccgtcggaggtaaggcgccaggtgctcaggctctcccgcctctccgccgcgccgcgccgcgccgcgcgtatttctgtgggcccaggagggttgagcggcgtttcccggagcgcgaaatccgatgccgtgttgagtccgccgggggcgtcccgggggaaagtgagtgtgccttccctggaagggaaaatttaacttggcaggaccgcagaaagtcacagtcccccttgctccgagatctggcctttgggaagcgggttgagggaggcaacctttcttccgcttgcaaatgtgtttgctccagatgtcccggattccgccggccgttcaaggcgtgagcaccttcccagactcgagatctggcggggcagattaataccctccacttcatctggactttactctcctgtttcctccgcaggcgtgagagtcacgcaggtcatctccctagattaacgggggaaaaaaaaaatagaagtgccttgcaggtgatacccagattaagtgggggggaaaacattgaagagccttccaggtaataccaaacggaggcccactttcccccaatctgtcatttctaacatcagcaccagaaaccctttggtggtatttccaagaagtttaaaaagctgggctgttattccaagagtggataacctagagattcatacttaatcacgtgggactagttaacaaaattttcatgaggaagatcagctcttttacatcgtatccttaaaaagggactgaaatttgctttaattagatttcatgggggcctggaactaagtttgacacaggcatgacctaaagcactagtttatgtgaacgtttatgtgaccactttatttgtgctaacccaagtgaactgcaaaggtaggtgtgaaaagttagctcaacaaaatattttgtccacatttctaggaaaagcatataattttgttgccctggactcagaggagtgcagagagctgtctttgaggcctacagcggcacctggagttctttaattagttgtttatcaggtctgttcaagggaaattgaggtcaaggcaaaattccaagaggagacgaaagagagcttaaagtgtaaccctttgttctttcgaagttcccaggcactaaggggcaaatcgcaaacccatctgtgaattatttgtattgatataggatactaataatacttcacatttatataggattttttttttttcaaaaaacactttcacaggacactttcctttgatctctaggggaggcaggtggcaggttaaatacgataacttggacatggagccaggttctaccctttactagctgtgtggacttgaatgagtttaacttctctcagttttcgccatctgtaaaatagagattagaatatttgtcttgaagagtattgtgaagagtggagtccgtatgtaaacgtatcagattgcatagtttatggttagggcttaatacatggtaactaatatgattaatacctaacagttaaatgaaggactgaagtacaaagtgattggcccttagccaaggtcacatacctagcaaaaaaaaacttgactgtaatttaaacttggatcttctgattcctaagctagtgagcttgttagcatacttaactgacaactttaaatgtctttgctgtaaccagggacttcagttttagttacagatggtcctgggtttatgatagttagacttaagatttttgacttcgccatggatttattaggatgtaacttcctggacttaagatttttccactttatgggtttattggggtattaaatgcatttttgacttatgatatttttgactcacaatggatttattgggacataacaccttggtaagtagaggagcatgtgtattttgcattaacacttctcatcattatatatgacattattctgagctcaaggtacatgattttattcaatctacttaatccctaagaagtaagtattattattaatatccccacttcacagagaggaaacagactttgaggttcagaatttttccagaattacacatagcaagtggcagagcctggatttgaattcagtgtattctttttttttgttttctgtttttcttttcttttttttttaatgagatggggtctcactctgttgcccaggctggactgcagtggtgcgattatagctcactatagcttcaaactcctaggctcaagcaatcctcctgcttcaccctcccaagtagctgggactacaggcatgtgccaccacatctggctaattaaaaaaacttttttttagagatgtggtttttctgtgttgctcagtgtggtttgaaactcctactctcaagtgatcctcctacctcagtctcttgaataacacagacacggagccattgtgcccatcttttttttttcctcccatgaagctatattgttacccaagttttccagagtctcagcaatagcttggtagccacgttcaacattttcagtgcactgacttgcaaggtcagtttccaagataatatacacgagttgttttcatgtgttagatcaaagtttataacattttataacccgggtatatgggtaaaaccccagttttaccatgtttatgcatataaccaacattaatgcaagttttccatctggattagaaaaagttaattatatgcagaataaagtattggtcatcatagcatagtacgcataatatttcagtggttcactctgaaacagaagtaactcactaaaatgaaatgcacaccaaggagattccattttcatagcccatttccccagcaagcaattacctcagcaataatgatgtaaacaactttttttggttggtttttgttttttgagatggtgtcttgttctgtcgcccaggctggagtgcagtggcacgatcttggctgactgaaacctccacctcctgggttcaagtgattgtcctgcctcagcttgcctaatagctgggattatgcaccaccatgcctggctaatttttgtgtttttagtagagacggggtttcaccatgttggccaggctggtcttgaattgatatcctgacctcaggtgatctgcccgcctcggcctcccaaagtgcgtgaaccaccacgcccagccctgtgatgtaaataacttttgagatgtcagtggggacaaaaacatttgccccccttaatgggattgaatagatagttaactcagaagtcctgccttttttctagagtggtggctgtaaggatataaatagcactacatgaagagctagccactctttattgaggagaaagggaaaagacttgatgtcaagtggagcagataatcagggcccataatgtgcccacagctgtgctaggcctgtaagcctacagtgtgttcactccatcctcaccagaatcttttcattttacaatttagtgaagtgagactctgagaagttaaataggctggtatgtggctgagccaggatttgaattctggtttcctggttctaagtctattacatagcagctgtgagattcttggtagctgcattcaaattccaaatacgaacccagaaaaacctctttttttttttttttttttttgagatggagtctagctctgtcgcccaggttgaagtgcaacggtgtgatcgtggctcactgcaacctccgccttctgtgttcaagtgatcctcctgcctcagcctcctgaatagctgggattacaggcacacgccatcatgcctggataatttttgtgtttttgtagagatggggtttcaccatgttggccaggctggtctcaaactcctgacctcaggtgatccgcccacctcggcctcccaaagtgagctgggattaccgacgtgagctactgcacctggccggttccaagtctattacatagcagctgtgagattcttggtagctgcattcaaattctaaacactaacctggaaaaacgtcttttgtaaacaaattttttttttcaataaaagcctcagacttaaccacaaaaatatttattgcctcaaaaagatgttgatgtgagactgacagttgtggacttcagctagtgttttgtggtccctgaaggaataagctaatgaaggctgtgaatcagttaagatttgttattaagttgagacagatggccagttatgcaaaaatccctcatatctgatgccttttttcaaaacaattaaatgaacaattcagtaaaaagaaaaaaaaccctgtaaattaatctcatctaaagaacaattaactcctacataaatgcaaagactcttcttgagaaagtttaatacataccatctttttttttttttcttttttttgtgacgggagtctcgctctgtcgcccaggctggagtgcagtggtgctatctcagctcactacaagctccgcctcctgggttcatgccattgtcctgcctcaacctcctgagtagctaggactacaggtgcctgccaccatgcccggctaattttttgtatttttagtagaggcagggtttcactgtgttagccaggattgtctcgatctcctgaccttgtgatctgcccgcctcagcctcccaaagtgctgagattacaggcgtgagccaccgtgtccggccaatacataccatcttttaaaatatccaggttacatgaaactctcgagctatggtcatacattttgttgaaggggcattttgaatatttgactactgtaattgtttggcaagtagtttttaccatgatatattttcctaattctctattatgtggaaatattgtaggaaaaaataatgaatgtgaaaacttaagaaaagacgtataataaaaaaaagaaccccactttgctcaatacattcattttgtaaaatgtaaaaaaaaaaagaaatgatgtcatcattattgatccttggacattaaaagaataacaaagaaatattattaacaaaaaaaagataaattttatagttagaaattttacatgtccagaaactggaaattcagatgcagtttctctgcagaattcagaaattacttccttttacttgtttagattagtttgcgtgtgatattagataccaaatagttcattgaataataaatgagtaattcagtgacttattctctccccatacataaagcagtcaaagaaagcagagtacttgagaagcagaaaaggcaagaagtgttattcttttttttttgaaatggagtctcactctgttgccaggctggagtgcagtggtgtgatctcggctcactgcaacctctgcctcccgggttcaagtgattctcctgcctcagcctcctgagtagctgggactacaggtgcatgccaccatgcccagctaatttttgtatttttagtagagacggggttttgccatgttggcctgtcttgaactcctgacctcaggtgatctgcctgcctcggcctcccaaagtgctaggattacaggcatgagccaccgcacctggcgtagaattgtgatttttaaggtgagattttatcctcacaagcatgctgttatttctcttaaacagacaaaccttcttttgacacctgttcccatcccctgtattaccacctcatttctcctttttagcaaaactcttcaaaagttgctgtctctgagatacaatttgtatctcattttctgctctaaacctttcatggcttcccctctcacttggaacaaaccaaaatactatgatgggctacgggctctgttacctcttcagaatcgttgttccttctgctccagccagactggtctccttgaatgctggagccttaagacttttgcattggtttttgcctccgccagaacctcttcctacagaatgcccttccttaagtctgttcaaatgtcatcttcttggtgaggctagcactgatcatctctaggtgcaacactccctgttcccttctctgcttaatttttctccgtagcatactatcctatgtatatttaacttattttgtttatggtctgcccccttgccccaatagaagctccacaaaggcaaggatttttgtctttgtttactgatgtggccctcaagggcctagactttgcctgaaacatattatagttggagtttaaaaaatagttgttgaataaaaggatcctcaccaattcagtagttaaaacctagtgtctttagcataaagctttagtattgattacaatactaatatcttatgtaggtgttaattttttttatgttctgctatgaggaaagagactagcctttaggtgggggtagtgaggaacatcactcatatctttaaaattttttgaaaataaatgtatatatttaaggtatacaacacgatgttttgatataaatagtgaaataattattacagtcaagctaattaatatatccatcttagaaactatgaaatttgaggctctgtttgcaagcatagtcacttcctaaatgagttacagcatatgaggagctgcttcctgaggcttcccagaagctgcttccttttctcaacttgctgacactagcactgagctcttttgaaagtcaatattctgtatttatgtggtacttctagaagacatgaaatgttctgcagactttatcatttcccagcagtgcaaataactggcaagtggaactgttatctttctggttcacaaatgggaaactaggacgaatagagaaaatagggttttactgatttgcatatagcaccccctgccctggaaaaacaagttacaaaaatctacaaaaaatgaaagaattgggaattgggtgtgaatattactattgaggtctgaggaatatgaagtaagcccgtcaaaattgagtagaaaaagtgtgagaagcagtccctgacatctggtaggggccttggcacttgcaggaaggccttggcattctgttgcacataaacaattgcacagcatgtcaacagcagataagactgctctgactgtggtaatttctcctaccttacagataggtttactaagattcctggtcatagaattgcacccatttcctgacagcaccctatccagaacaaacccatgctttggaccctctcccaaatcacctaacacaagcccaaatcctttgtaatgtctctttctgaaacccccaggatttcccatagagtgctgtcaccctcctcacaaggagcaataaactgcaggtgagaatccctggtggtctttgcctggaaggtgttggcagttgtcacttgtcactgttgggttattacaatgcagattctaaagaggcagcctgaatttggtttccctgactccactcatcctcttttagtattttaatgctgtgatcataccagtctaatcttagcactttggaaggctgagaagggagaatccttgaagccaggagtttgattgacaacagcctgggcaacatagtggtaccctgcctcttaaaaaaaaaaaaaaaaaaaagccaaaaaaaaaaaaattagccagaggtggtggtacgtacctgtagtcccagtattcaggaggctgaggtgggaggatcactcaagccggagtttgaggctgcagtgagctatgattgtgctgctacactccagcctgggcaacagagcaagactgtctaaacaaacaaaaacctgcaaggggctcctcattacttacaaaccaattactaccagccaaacaatgtctcatattcctgtctgcctcttgagtcctctcctatgcccactgttccaatctcacttcttaataatcccctttacattcaacaatatttaactgtttcattccattgtgctttttctcatgctgttctttgttccagtaactcctactcacttttctagtcctgtaatttcctccaagaagcctaccctgtgaatccagaaatctggatacctgctattgcatgatttttaacatagcatttgcacataagattgaatttagttactcctctgtttcttcctgagggctgggacttttttcctttttaaatcttgttcttagatggttagctagatggtttagctgctccttaaaagtttactaaataaaagtagataatggatatagtaggagagaaagctgaggatatagatagtagtaagactacaaatgtccttgaagttgtatggattttattctgtaggcaatgagaataactcagatctttttcggaagaagcaaggatccctgacacatattttacaaagtagaagcacactcaaccattcattctctgtattttctttctaaataatattcagtttaaatggaatataatggtattttctggatttacatcataccatctgagaagttataaatatatcacagtcattatgtaggcttgatatcccctcctgagcaccagcctcatttttatatgaaaaattcaggcaagaaaaacatgactcattttgagaagtgggaggagaatccaaccagctgccttatagacctcattgctgtcaggagggtatgaaatggataagactgctgttgtgctagaagtaccctgaagaagatatctgaacaaccctaaaataaagtttacacccttgggcaggggtagactcctcttcaaaccctggctacctgtaggttaatagccagccccttcacattctcccacctgcaatcaccaacccagctaccctgagtggagtggaaggctcttgcaggttatcttgggcaatttgtatgtatgtatatgtctgtctggctgctgtaacagactatcaaaaactgagttgcttctaaacaacaaaaatttattgactgggaagtcctagattgatgtgccggccatgtggtatcttgtgggagcccacttcctggttcatagacagccatcttgttgcatcctcatgtaacagaaggggaaagggagctctctctagggcctcttctatgcaggcactaatcctattcctgaaggcttgaccctcatgacccagtcacctcccaaagaccccacctccaaataccgtcacctggtaggaggtgggggattaggcttggggacacacacatgttcagtccatataaatatttatattaaaatgtatagggaggtaaggaagcttaggacagcttctgcagctgcacagtcaggttccatggacagttggaacgttgctcattctgttcaggttaaagcagtagctttatactgtagagaactgagagcaagtctagttgtccttaaccttccatctcagcctctctctctccctgcttattctacttttgactgattctttcttctcatcctcttgactttgctcctcccattattacctcaccccactgtgtctttgtgtttctttacctctctactttctgtgccctgcctgtgtatcttattaaacttcctaagaaagagtctttgttgtgtcagggtacagcacaggtgggacaggacccttgggcctgtgggtcaggttcatctctgctccagcctacagggtcatgtggtacagaggtaggtgagcagtggataaggagtcctgcaggagagagctatgcacatggtagatattctgagacatcttgatttaggggaacgtaaatggcagacaccttccatggcctgtttagaaaacgaaagtattttccgttctctatgacctttatgcattgttctctttatctggaaatctctcccctactctttccctgttaactcctacttgtgctgcaggacttgcaggtcattacctgaagcctccccactacctcaggactgggttctgtgcctatcctctaaacttccataactcttatcagactttatggtcatcattgctttaatgtctgtctcttccataagattgagagccactctgggcaaagactggcagttagtatgcagtaaaacttatggctgggcatggtggctcacgcctgtaatcccagaagtttgggaggctgaggcaggaggatcacttgagctcaggagttcttgaccacctgggcaacatggtgaaaccccgtctccacaaaaaatacaaacaaattagctgggaatggtggtgtgagcctgtagtcccacctactcgggaggctgaggtgggagtatggcttgagtctgggaggtggaggttgcagtgagctgagattgcaccagtgtactccagcctgggcgacaaaagccctgtctcaaaaaaacaaaagaaaaaattattacagaaattttaaatacatgcaaaatcaaggaaatagtgtaattaactccatgtgcccagcttcgacaattgtcaacatttgccaacatttcttttcttccctcattaacaaaatttttattaaatataacacaagtagagaaaagcacataaaacaaatgtgtaaattaatggataaattgaacacctttgtaaccacacctgtgtcaggagatagactttatcagcctcctgagaaccttccatgtgccccttcccacttgcacccaagagtaacaaccatcctgactttcatggtaatgaatcccattatatagttttttcatttatgtgctttcctaaacaccataatttggacttcttttaaatatgtttttgagtcttttttaatctatagattccccttcgtcttgttctctttccagtgtatttgttgaagcagccagatcttttaccctgtgtgtttcacagtttgttttttgctgattgcattcctgtagtctagtttggcatccccagtcactgtatttcctataaattaatagttgtagtctaggtttaatcagttggggtttgatttttttcccgatgagacaatatcaaaagtgtagttaaaattttatattgaatgaataaaatcaacagataaaataggggtcttaccttttaaaatgtcatcagttctattctactggaatagactccatcccattttgaaaagtctctcctatgttttttatttcagttgtctgtacggtgaagcaactgtgtttttctataaccctctgaatgtatggctgggactatctgtgagcccttcatccctaagaaaccctctcagctataccctcagcagagccagatgtgcttttcctacatctgaatgctggcagaatttttctgatgcataattgtacatatttatgggatatgtgtgagattttgatataggcatgcaatatgtaatgatcaagtcagggaatttagaattactggtggaattttaatttttcaaaagaaatcactgtggagatatttcttcctgttatgtgtataaagaaccaaatacagggaagaaagaactaaaaaccctgtaataaaaggtgtgtaccatgtcaaaaaagtttactttgatcatttgtacatgttatgaatttatagctggaaagagtgattataatacagttttaaaatggaaggtagataatttaggcatgttcaatcttattcttcattagaaaacttattggttattggctttgtgccagtcactgccccaaatgttgggatacatcaatgaataaaacagacaataatccttggccacatggagcttacattctagtcctccatcctatgagatgggtacttcttgagtcaatgagactgaatgcaatagacattgttgggttattctctgaactcttataaattataggttttctttttatacccacatttcttgccttaaggacctagaaaaaaggacctagaagcttttgctaagcaagaggaaaacataagtatgtttatactttttgctggaaaatgttccatcatttatatggccactcttaatacctcctctgtgccatatactcttaaacctcccttctgtttggaagcatggaattatagtatagcttagtggttaggagtgccgcttactatctctgagaccttgggcaagttattggctgctctttgtttctgttcctcatctgttaagtggggttaatgatacttgtcatcacaaaaggttgtcgtgaggggtacatgaaaaatcatgtatgtaagatctgtgcctggcacatagtaggtattttttaaatggtagttataattgtagagttggaagagtctttattgtattctaacttttgaacttgtttaccaaatagacaaccatctttagttacttttaactgatttttttttaattgaaggattcactcagagcgcttattaggagttcagcattgtgcttgatgctgggaacttaaaggtgaagatgacatagccccatcctccagtggagtgtggttcaatgacaaacaatttgacaagctagtgtgggtttcctaaaatgtgttccaagcaacatgaatcccttgacatattatagaaaaaatgcctccagttgtcaaataactttgggaactgtattttgtaaattcatgatacatattaatggctttgagaagtccactaaaaatttaaatatccaagaatcttggtgtttattattcccttcacttatttgagtatcgtgctctcccttttttcctgcataacaaacactccgtggaccaatattccaagatatatacttcaaaaaaatgctggtatgttttttcaaaaatgattcatcagttattctgtgataaaaagggactctatggtaactcataacgttctgttatagtgaatgcccatttagcaccaaagaactctgccaaatagcttccatttcatccttgtcctttactgatcgttttgctgccctgtcctcctcactatccaactttgggcaagtcttccctcttgttggggtgggtgaactacaccagtggttcccaaagccagttgcctcttagaatcaccttggtgacctttttaaagaacacaggcttctgggcttcacccctacagattttgactagggcctgagaatgttgtcattttaaaaaagcttccctgatatacttaggtggctggcctgtcatccattggtagattgtgtgtttgggagccactgaattaaatgaagagatccaaggtcttttctagcttgaatgttcctccagagcttgtgcattcaattaaaaatattccagtgtcatctttatgtacaaagtattgagggacatacaatgatgactatgacagtgttttgcaagtggcttgactatagaaatccttgaaatggtagagaccctggtgtatctaaagtcatttaggctgggtgcagtggcacatacatgcctgtaatccaagtactttgggaggccaaggtcagcggatcacttgagttcagggattcaagaccagcctgggcaacatggtgaaatcccctctctacaaaaaatacaaaaatgagtaaggcatggtgatgtgtgcctctagttccagctgtagtcccaagttgaagcttggataggactcgggaggcagaggcaagaggattgcttgagcccagggaggttgaggctgcagtgagccatgatcgtgccactgccctccagcctgggtaacaagagtgagaaaaaacaaaaaacaataacaaaaagaaaaaaagaaaaaataaataaagtcatttagagatcacttcttgttagagacgtgctagacagagaatttaaaactgaagtgccaatagcactctgtgaattagagattaaaaaatgaagatgtagtatttttgaacttaatgaggacttttggaaaatagaattctatgaatataattcagtaaggcatagtagtataaacttgacataagaatttttttagaagctgaagcatattttctgcttttctgacatcaaatgtaatgtttggaaatttgggatggtgatatcacacaaattcttttatagttgtttcaaagctttataggtaaaggatataggtgggctgtaatcaattcgtaagatctattcctaatctaacctgtttcatctctcttttttttttttgagacccacagtgatcatcacttactgaagcctcaacctcctaggctcaagtgatcctcccacctcagcctcccaagtaactaggattataggtgtgcaccaccatgtgtggctagtttttgtatttttagtagagatggggttttgccatgttgcctaggctggtctcaaactcctgagctcaagcaattctcctgcctcagcctcccaaagtactgggattataggtgtgtaccactgcagccgaccgaccctctttcatctcttgattttatctcagtgttaactgcaacctacctctcaagtcctcctcttcccattaacctgttggctctcagttaatgagggcatccataatgtttgaccagaggctgccaaaggaaagtgatctcttgcttttgtgctgcattcatttactgaagttactagcagaaattactctctataaagctgaagtccactgtggagctacacagtaaatgattattttagttgaaaaagtaaggtatataaattgaatttttacatggtaaacatccaaaagatgtgggccacccagaaccatctattgtaaccactttctttactgtccttccagaaaaatactctataaatgtgtgtgtgtgtatatagatagatagatagataggtagatagataaacattcatatctgtgtggggggtatatccccccactttatcttcttttttttttttaactcaattaagagcatattgtattctgttctgtatggttggtagtgggagaagaacaggagtagccctaagaaagaaatgctgaggcctgggaatggcagtcactgtatccttgcagtgtctcatagggccaccagggagtccttgtgcaaggagagctgccactgtgtctttaatggtgattagacaaattttaataatttctaagaagtctacctgtttcctgaaagggtttcctgtgctgcctttgtttccctgtgtcttcttggtgtaaacccccatcacctgatataaccaaacgtgttccttgacactgcttattcagagagaagtaactaacaaacacctttgggctagttgctcacttagacaaagaaaagaggaagccaattgaaggtggacggctctgtcactgcttgtctgaattgggatccaagaaactggccttcattactcatctcagaaactctagccctgctgtttggggtgtgtggagtattctgaggtttgggtgattaaaatgtggagtgggaagttgaagggacttagagctttgtcagtggtagaatggtttttttttgtttgttttttttttgttttgtttttgcgatggagtttccttctgtcgcccaggctggggtgcagtggtgcgatctgggctcactgcaacctctgcttccagggttcaagtgattctcctgtttcagcctcctgagtagctgggactacaggcgtgagccaccaagcccagctaatttataatgaagtgttctttacactaattttaaacaggccccagtttcaagtgattttcctgcctcagcctcctgaggagctgggattataggcgcacaccaccatgcccggctaatttttgtatttttagtagagatagggttttgccatgttggccaggctggtcttgaactcctgacctcaggttatctgcctgcctcggcctcccaaagtgctgagattacaggcatgagccactgtgcccagcctgaatgtttgctttttagaaacatatttgaccctctgtaggtggtgtggctaagaggcttaagaactcaagcattcagaatgtgtatttgctatgtgtataaaaatctccctggagataaatcaaagcacatggagagggatgactaaaatccaggctctacatctcagtctataaaagtcacaggttcttaagttacagtgttaaagtagccttaaagggatacacagtaacaaagttgaggaaatgataactgtgtatctattcttaaaacaggttacatatccatatatttcattaatgtagtagtggttgtataattggcgttaacactatgtccctcatgatccagggccagaaccttaatttaaccacctgaagcttctcacatttgatactagcagtgtgttctgggtgtggttgggtattaggtgctggtcatgattcctgttatttccttccttcttctgtgttctctgtgctttccccttcctttctccattttcctgcctgtatgtaaaagtgggtggaggaagggaagcatttcttaagaattgaggagaagggaattactgtgttttttctttttctttttttttttttttaatttgagagggggtctcagtctgtcacccagactggagtgcagtggcaccatcttggcccactgtaacctccacctcccaggcttaagtgatcctgtcacctcagcctcctaagtagccgggaccacaggcgtgccacagtgcccagctaatttttttttttttgtatttttggtagagatggggtttcatcatgtggcccaggctggtctcgaactcctgagctcaggtggtccacccacccaaagtgctgggattacattcatgagccatcgtgcctggccaaggaattattgttgaacacctattaccacttaacctatgctatcttaacggaaatggtaattcttgctagaaccaccagaaattattacaatctatagaagaagcaactggagcttagagtaaaagtaaattactcaagtttcacagcccagagggatatctttgacttgaggtctatctgacgtcaaagtctgtattctttcctttacgtaagtgattcttaaccttagcagacccaaaggcttcctctaataacaaatattttgtgataccgtctttactttcctgaaataggattttaaacaatgttttctacctatacgcataattgattccttaactctaatattagaaacaaacttggattttaatatccaagtatttggaaaagttatcttaaaaggcatcaagcagctgggtgcagtggctcatgcctgtaatcccagcactttgggaggccgagacgggcaggggtcaggagttcgcgaccagcctggtcaacatggtgaaaccccgtctctacaaaaaatacaaaaattagctaggtgtggtggcatgcatctgtaatcctagctactcgggaggctgaggcaggagaattgcttgaacctgggaaatggaggttgcagtgagcctagattgtgccattacactccagcctgggccacaagagctaaactccatctcaaaaaaacaaacaaaaaaaaaaccaaaacaaaaaacatgaagcagttgcttgtatctacttgtagtgaatacatttggatttgaaaagagtaagaataagatgagattcaggttgggtgcagtggctcatgcctgtaatcccagcactttgggaggctgaggcgggcagatcacttgaggtcaggggttcgaaaccagcctggccaacatggtgaaacccatctctactaaaaatacaaaaatttgccgggtgtggtggtgcatgcctgtatttccagctactcagctactcaggaggctgagacaggagaatcgcttgaacctgggaggtggaggttgcagtgagctgagattgtgccgctgcactccagcctgggtgacagagcaagactctgtctcaaaaagacaaaaaaaaaaaaaaaaaaagatgggattcaattgattgtttttgtctctttttcctcatattcaacattttaaaataagagatattaatgtttgtaaatgctcatagaattgccatagtgcaacaacaggagcagactgatataaatgttttatgttacaaatccaaataacatgggcagcattgctgtcaatgacttgattttctgaaacgataaataactcttggtaaggcactgcataaaaaagtacagtcttcccttgatttacatggtaattgcagcccatagaaattcagaataaaaaatacgctgtgtgtaacacagaattaggggctaggcttaaatagttgatagtttccccccatccttccagcatgaatgtctaataggacatttgagcatcatgtggaatacaaagcagttcttcatgaagctgggcttctcaagcattgcaattcaaacagaatccttgacccatgccctgcttccctcaaatgccagtggtgccatacaatcattttaacaatcaaagagaccccttgatatttccacctgtttccttagaggccagtattggctgtcacctccagcaatactgttttatacttggttgctagaggttaagtaattgtcctacactgtgaagttagaagatgataaaaagggaggtgcgggagtgagtggggatgggaaacaataagagggcgaacaaggagaaagacgtcctgttggttttgtacttttagttttaggatccatctttttaaaaatgttttttagagagagggtcttgttctgtcacccaggttggagtgcagtggtacaatcataactcatgcaacctttttttttttttttttttgagatggagtctcactttgttgcccaagctggagtgtggtggcacaatcttggctcactgcaatctctgcctccctggttaaagcgattctcttgcctcagcctcccaagcagctgggattacaggcacatgccagtacccttggctaacttttttgtatttttgtagagacagggttttactatgttggccaggctggtctcaaactcctgacctcaagtaatctgcctgccttggcctcccaaagtgctgggattataggtgtgagccactgtgcccggccctcactgaaactttgaactcctaaactcatgtgatcttctcgcctcagcccctgagtagctaggactatagacaaaagccaccacacccagctaatttaaaaaattttttgtagaggtaggatctcattatgttgcccagggttagtcttacaggactgtaattaaaagagtagaacatgtgtttggcttgttaaatttgtgatattcttcctatgcactgacaatggtcaagctgagaaccaaatcaggaatgcaatttcattcacaattaccacatgaaaaaaaaaatacccaggaatacggctaaccagggaggtgaaagatctctacaaggagaactatggaacactgcccaaagaaatcagagatatcactaacaaatggaaataggaagaatcaatatcattaaaatggccatattgcccaaagcattttatagattcagtgctatccctattaaactaccaaggacattcttcacagaattaaaaaaaaaaaactgttttaaaattcatatggaaagacaaaagagcctgaatagccaaggcaattctaagtgaaaagaacaaagttggagacgtcatgttatctgagttcaaaatatactatagggctatagtaaccaaaataacttggtcctggtacaacaatagatatatagaccaatggaacaaaaaagagaacccagaagtaaggctgcatgcctacaattatctggtccttgacatacctgacaaaaacaatagggaaaggattccctattcaataaatggtgctgggatgactggctagccatatgcagaagattaaagctggaccttttccttacaccatatacaaaaattaaatcaagatggattaaagactttaacaaaatccaaaattataaaagccctggaagacaacctaggcagtaccattctggacataggaatgggcaaagatttcatgatgaagacatcaaaagcaattgcaagaaaaagcaaaaattgacaaatgggatctaattaagctaaaaagcttctgcacagcaaagaaaactatcagcagagtaaacagacaacctagagaattggagaaaatatttgcaaactaggcatctgaaaaaggtctaatatacagcatctataaggaaagttacaagaaaaaaaacccaactccattaaaaagtgggcaaagaacatgaacagacacttttcaaaagcagacatacatgtgaccaacagtcatattaaaaaaagcttaacatcactgatcattagaaaatgcaagtcaaaaccacagtgatataccgtctcatacaagtcagaatagttattattaaaaagtcaaaaaataacagatgctggtaagattgcagagaaaaaggaacatttaaacactgttggtgggagtgtaaattagttcaaccattgtggaagacagggtggtgattcctcaaagacctaaaagtagacataccatttgacccagcaatcccattactggatatatacccaaaggaatatagatcattttactgtagagacccgtgcacatgtatgttcattgcagcactattcacaatagcaaagacatggattcaacctaaatgcctatcagtagtagactggaaaagaaaatgtggtccatatacaccatggaatgctatgcagccataaaaagaacaaaatcatgccctttgcaggaatgtggatggagctggaggttattatccttagcaaactaatgcagaaacagaaaaccacatactgcgtattagcacttataagtggaagtgaaatgatgagaatgcatggacacatagaaagaagcaacagacactggggcctagtggagggtggaggatgggaggagggagaagatcagggagaataactagtgggtactaggcttaatacctgggtgatgaaataatctgtacaacaaactcccatgacacaagtttatctgtacaacctgcacatgtaccccgaactttaaatgaaaaaaatcatgtaaaattgagtagcgattttagaaaaatttgtgatgtctcaatcttttgtaatatcttgaagtgtcacctgttgctgtggctatttgacaggtttatagagtcctatagcaggtgcaaaagttagggtggaatgatagggaagcatagggtttgagatcagatggggaggagggtttcagggtagggtggcctgtcctgggtttgattcctgtagatgacaccttctagccattttctcactaataaaatgtacaatgaattaccttataggtctgttgtgagaattaaatgaaatagcatgttaggtgtccagaacaatggtacaatggttcaataaatgttactcctgttttcctcaaaaaagatgctggatgacacttatttttgcaaatttttcttttctttttcttttctttcttttttttgagatggaatcttgctctgttacccaggctgaagtgtagtgtcgtggtctcagctcaatgcaacctccgcctccctagttcaagcgattctcccacctcagcccctgcgactagctgggattacaggtgcccacgaccatgcccggctaatttttgtattattagtagagacagggtttcaccatgttggccatggtggtcttgatctcctgaccttgtgatccatctgccttagcctcccaaagtgctgggattataggcgtgagccactgcacctcgcctcaaatttttcttataatttttctattctagaccaggtacagttttcattctcccaccctttgcctacatccagaaaataagaacaaatttaatgtctatctctgtagatggtcctcagtctaaactacctgtttggattctgttatagtaactaacccggactctctgtggatggtccttagtctaaactacctgcatggattattttatagtaactagcccggactcttctgatgagggctctttcaatcaaatttagtataaacctaataagcaatttcagtcaactaagttgaacatttcagttaaacttgggcaataatacaatttattcagaattgttttgtattgcatttgtcaatgcttattcttctaagccaaaaaaaaaaccttttagtaatacatgtagttcttcatgtcgtatttctaggcatagagagtacctgtgacagaatttgtttcagcatataattctgttattctacttctttcccccactgaacatttagagttaatatccaactctccccatactcattaagtctcctagaatcttggtcattatgctcaagttgtggggacttgtattttctcccaagaagcccaggattggggcatgtggggaagattacttcaataccaagggatagaagaactctaccactgcctttcctcaacatccaaatcacatgactttccttttatcccatgctgtcttagtctcagcatcttgaagtgggagcattcttatttgatcagcttaatataaacaggttagtgtaaaattgatatttcaaaccaacccagatgcttcagagagtgaaagagatagtatctataattactctggaacaacagggataaactgggacctagagttatcccagttataaccaaactgcttgctagaaaaggagaaagaagaaaaatatgatgtgagaaagtttatcatataattattaattgccaacaatatataagccattttcctggggaataaggaaggttttgcattataggcattttttggaaggctagggagagggagtatgtgtgctcataaaaatagaagcaggtagcaagggctcagtgtcagcacccagactggagccaggagactggtactcctcatcctggctctggcttggtgacacattcctgggagttgaggatggagtcctgtggtagcctgtcagcttcttcagctcctgcccctgcttggtcttctccctctcttttctaagtgctctgcctcccctagcaccgggagtcttgcaggcaggaatggcggtaatgttggcaagcagagagttggaagaaactgcttggtgagagtagggaacaggttgctgataatcaacaactccgagcaaaggtcagtcagccagggcagtgcctgggtatctccaagtctgtgacagaattctgttcttggctgctcttcaccctttcccattctcagtttcctgggcttattctatccctggggcaggagatggttcaaaattgaaaagcctgaacctagaagaatcctcacatacactccagattgagggctaacctcacttgtggattcagtcctgtcaggcccacccataggtgaattttcttatgctctcaaacttcctgatgaaacatataagtgtgtgaggtggtcagtgaatttgccttcacccttttctcccagatcatttggctccctcatctagggaaccctgtagtacttttttttttttttttttttgagacagagtctctatctcccaggctggagtgcagtggtacaatcttggcttactgcaacctctgcctcccaggttcaagtgattctcatacctcagcctcctgagtagctgggattacaggcacctgccaccacacctggctaatttttgtatttttagtagacacgggctttcaccacgttggccaggctggtcttgaactcctgacctcaggtcatctgcctgcctcagcctcccaaaatgctgggattacaggcatgagccaccgcacctgacccctgtagtacatttttatgatgacttttaggtgttttagtttagaagaaacatctttctctctcaagatgtttgatattttctcaggtggcccatattttccccatagagtgctcatctctttctgtcagaattcctgttgtagggtgtagtaaggaatagactgtcttcccccatcactccctctgacacctgaatggctcaccatgcttactttccaattttccatgattcatttgggtggtttttaaatatcacactctcttcagacatttcattgtaggggttagaattcagcctcgtgggccaaaaggaacacagtgctctacgaacttctgccaaacaaattttaaagttttgtttaaggatccttttgaggtctaatggcaatcttttacaagttatatttgtatatttggtaatttggaacgtttaatccacaaatctctttactaataattataatgtataattatgatgttttataaaccatcctattccagcatataaaatgtcccctgttatagtctctctttgcctgtttagaatctcttccatctttaatgttaaacaagaggaggcttttaagaagataagtggttcagaaagcatggaaaatttaacagcacctgacgggggaaatagcagtgatttatgatgtctttcaaattggcatgcaatgttgcagcattattagactaggataagctcaggtatctcctctgagtgtaaaaagattgtgggagaggatgatatatatatatatatatggctatatgcatttgatttattttattcgttggtttagtatttgtgtaatgtccacaaaggcaagacttacacctattccaattctttatccttttcttatgtctcaaggattgctttgggattttgattttcttggatacacagttccctttattatatttcattagtaaagaaagtgttcttttggttatgctgggaagtcatttggtagattcaaaatatgaatctgactgtttttctttttttggatagaattcttatttgtcatattattttactcattagtaatactgaaaaaagtagttctactggagaagagcacaaagagtgatgattcaccttttatttaaggcttgccactgctgacccagggcagctaatttagaagtgaatcatttatagaaagttctacacagttcaggacagagctttatacaatatactcatgaaggtctaaatagagcatacggtatcaggtttctaaatatctgtcttgtcgccaattttatgtcttttccagcctgtgaaacttgtttctagatgactgtagctattgacaagatgaagtcaaaggcactgtatatatataatgatgcatattttaaaactaatcctagaaatttagtacatgcattatactgggaaaataataggctgagattttaaattactgtgtttataatacaaagaaacaaatgtaactagtcatttttaaaactagttggaataaattttaaaatcatttataataatttaaattaaataatgttattgctattttgatatttatgtttggcttttaaagtctaattataaatagttatattatgcaaactgtcttactccttttagaaagtgaggggtttattaaatgaacacaatatatttggttccatacagagtataaaactgtatagtctcttctagaaggtttttttttttgctcctcctcctcttcttcctcttcctctccttctttctcctcctcctccttccttctccttcttcttcttcttttttcttcttcttctttcttcttcttttgtttcttcttcttctttttttttttctttaagaaaagaagaggtcccactgagttgcccaggctgtctcgaactcctgagcgcaagtgatcctcctaccttggctgggactataggtgtgtgctgtcacgcctgtcttctaaaagttttaaattcaaagctgtgtttatatttacatcacagctacagtatcatgggttagaaaaagcccgaattctagttctgactttgtcattcgctagctgtgtgaccctacacaaatcacttaacatgtctgagctggttttcttttctgcacagggcatattgatacttgtcttcaagacctgactcacaaggatttagttcagctaacgcattaggaagtgaccagtaacttagatgtccccacacagataatagttgtcagagaggcattgccgggaaaacaccctggagttggacaaccagggttggagttccaactgcaccaattactatatatgtgaccctacacaagccattttctcctctaaacctttgttttctaatctataaaaaaatggtattatgatacatctcacataaaattgttgttgataattaaatgaggtaacatatgaaagtagctggtacattaatcagtgtttcttggaccttaatgttgattttgaaaaaagtccttgctgaccttcctctccccagctcatttactttcacgatacagcatttcactggaagtgggagccagtatccaaactgtgtacaaataagagagatgagcagtttcccagtctatgcatataattgaagactagtttgagttctagaagttccttgatatgacacatttaccaaatattttgggggcaattatgtagcataagacactcagctttttggaagagttttgagcaatgtgattctgtccctgtggcttaggtagagctgatcctttcttttcaagcacttagggtacatgactatttttttttctcccccataattattttattcttagtttcaggttgtttttaattcctataactttaaggacagtaatttagatggaggtcaaataattattattttttctctttgaagaaaagtctttgagacttagataataagaacaacccagataaaaccttagtcactaacaaaggaaccataatccaggtggttttcttatgtataaatatgtggtactaactcctgaggaaagtatggtttcttttctctcttattattatttttgagacagagccttgctctgtcgcccaggctggaatgcagtggcatgatcttggctcactgcaagctctgcctcccgggttcatgtcattctcctgtctcagcctcccgagtagctgggactacaggcgcccaccaccacgcccagctaatttttttttttgcatttttagtagagacggggtttcactgtattagccaggatggtctcgatctcctgaccttgtgatccgcctgcctcggcctcccaaagtgttaggatcacaggcatgagccaccatgcccggcctttttttttttttgagacagagtatcactctgttgcccaggctggagtacagtggcccgatctcagctcactgcaacctctacctcctgggttcaagcagttctcctgcttcagcctcctgagtagctgggactacaggtgcacgccaccacacctgcctaatttttaaatttttagtagagacggggtttcaccatgttggccaggctggtctcgaactcctgacctcaaatgatccacccatgtcagactcccaaagtgctgggatttcaggtgtgagccattgcacccagactttctctttattttctataatgacattggctgatatttctataatgtttatttgagatacagtataaaaaagtaagcaaaattttgggggtagattgagatgtaggagggtagtcatataaaaataataatactgcttatgtttaaaatcacatatacaaataatgtaactctagctgcataagcccataatttgttccagagatctttggaacatgtagaatctttggccagctcagttcctgtttaaggaaggcattcaacaaaagaaagttggaagtggacttcctggcgttttaaacatgaatttgatgtgttttgggagagatttgttaacctgtttgtggaccagaatatcttttgaaacactaatgacaaataatttatttaatgctattcacaaagcacattgtggagtatataatggtgccaccagagaaaaagcaatattaattgatattaatggctctgtgcgatagttcaaacttttatcttcctagccatattgagtttcaatgatgaataatcataaccatgtggtaagaatttgaaaatactgaggaaagtagcaatttaatataaatgcacagcaagaaaactgtctgcaagttattcttcaacaacaacaaaagttgaaggatagtttttttatgaggagaaatgcaatctatcctggttatgatattaaaaaggagcaaaatctgatacttcaggaaagttcatgcactttaagaagctttcaagcataagtataaatatcattgttcatgaagccctgtattccagtaataataataaaaacctttaaattgagcctttttatttatttacttattttttagagataggatcttgctttgtcactcaggctagagtgtagtagcacatagcacatagctcactgcagtcttgaactcttgggttcaagcaatattcctgcctcagtcctaagtagttgagactacaggcatgtgtcagataattatttttttattttattttaagaggtgtagtctcgctgaggcgactaggctggtcttgaactcctgaccttaagcgatcctcccacttcagcctcctgagagctttttagtttaaaaagtatatttatacacttactgaatttttgtaatgaccatttgatgtagaccgaactttaataatgccacaatttacgtgaggatcaaggaggccaaatgactcaactaaaccccctgagactgaagggtacataattgaaactagatccagaactcttaactcttaatccattattttcatctcttacgtttctttttctcttctttctatttaacacattacaagaatgagactattccagtctatcgatttatttattttactgatattggaagtaaggaggagagattgtctgaaatttttgttaggggtgatagaatatgaaattaggatgccataatacctcagcgtattaaaagaaacacaattcaccatgtactttagatattttttaaaggataaaatgagatggtaggcagaaagaacttttaaactatgaagaattataaagatacaaggcataatgattctatcagttaggaaccttttagttgaaagtaacagaaaatccaacccaggatggcttggtgaaatttattgactcacgtaactaaacattctgggataggactgtgtatcagacagcgtgttttcagctgcaagtaacagaaaactacttactcaaactggctaaaccaagataacttaacttattattttacataaaagagagctgtgtgtggtggcttgtgcctgtaatcccagcgcttttggaggccaagcaggaggatcgcttaggcccacaagtttgagactagcctgggcaacatggtgagaccatgtctctatgaaaaataaaaaaattagctgtgtttggtagtatgtgcctgtggtcccagctactagggaggctgaggcaggaggatcacttgagcctggggggttgaggctgcagtaaaccatgatcacactactgtgttccaaccttgatgacagagtgagaccctgtctcaaaataaataagaggtagagtgggctccaaattggttaactgagcaactcaccgatgtcaccaaggacttaggtttatttcttctttttgctttgccattcttggcattggtgtctttctcagctggcaggaagatggtggtagaaattcctagaccacacacagataaggcaaaatacagaggaagaaagggactgtctctttctgtgtttctttattaggcgtgaaaaaatattttccagagcttcctggacatcttcctcctatatcttataagctggcattgggccacatgcttacacctaaaccatcacttaggctagttcacttttatgcctggaatagggggatgtgagtcattttcctccaaagtgcttgcaatctgtacacatctgggaattgtgttaggaggggaaaagagtggacaatctccagtgcccacccctgactgtctcgaagtaagactggagccagaggctctgctttcctcatgtcagcgttgttgccaggcccactcttctaatgtttgcagtgataactgcagtcattttagacctcatataatttagaagaagtgagggacacagaaccaccgtttggtagcttctatggaaaagagaagaggattctttccccaaacccccaataagttcattcttggattttcttggcctaaattggtagtcattaagcaatttaaacctgaggatgtggtcactcccacccaagctaccatatggcttaaaatggggaagagaagtttccaaaggaaaattagggggaaagggaatagatactgaagatgttgatgtctagcacaataataacaattcaaggccctccatcttctggccccaaagggcaatagctttctccttcaattagtctgtcttccatatagatgaggcagagtgataagcatgcagtccccaatctttatggcaccagggactggtttcatggaagacagtttttccatgtattgggacaagtgggatggtctctggatgaaactgttccacctcagatcatcaggcattagattatcataaggtgcaggcaatctagatccctcgcatgtgcagctcaccttagggttcatgctcctatgagagtgtaatgccgctgctgatctgacagaaggctgaactcagtcagtaatgcttgcctgcctgctactcacctcctgctgtgtggcctggttcctaacaggccaagggctggtaccagtctgcagcctaggggttggggacccctgcaataagacaaataagtctagtaagataaaatccctacctactaaaaggttttattttaattttattttttttgagatagagtctcgctctgtcacccaggctgaggtgcagtggtgcaatctcggctcactgtaacctctgcctcctgggttcaagcgattctcctgcctcagcctcctgagtagctgggattacaggcacctgccaccatgcctggctattttttttttttatttttagagatgggttttcaccatgttggccaggctagtctcgaactcctgaccttaggtgatctgcctgcctcagcctcccaaagtaatcccaaagcctgggattacaggtgtgagtcactgcgcccagcctaaagacatgagattctaaagctgaactgcccaatgttgtaaccactagccgaatttggatactgagaactttaaatgtagctggttcttccaaattgagacaagatgtaagggtaaatacatgctggatcttaaaaacttaatttaaaaaatgaaaaccatcttaataatttttacattgattataggctgaaatgacaatattttggatatactgggttatatagttttaaattaaattaattcagctatttcttcttacttttgttactgtgactattagaaaatttaaaattatttagcttacattgtatttctattgggcagtgatgctctagaaaatgaaatagtcatgggtactccatcagttatggaaataggcaatgatggcagtaaagcaacaaatacagattaccccagaaggtgttaaggatttcattgtacaatgaaaaacatcattaagattatatctactgaatcagtcattttccttacgttgtgtgataccttgttacgagtttactttccaaatcttttttgatttagtttagtttgtccgtcagagagtgttatattttaaaaaaaagttaaatgctgcctttcactgcctgttgtgtagcgtacttagattctggaagcaaatatttcttagaggagcattgataatatggccacttcactgttagttttattgttttcatatgagtatgagtgagggtatgaaagctcacagtagcttcttaaggttccttctgacttaaatgttcattatcttttgatgagtgaatgagcaggaactttgcattctttagaaactagtgtatcacggccgggcgcggtggctcacgcctgtaatcccagcactttgggaggccgaggcgggcggatcacgaggtcaggagatcgagaccatcccggctaaaacggtgaaaccccgtctctactaaaaatacaaaaaattagccgggcgtagtggcgggcgcctgtagtcccagctacttgggaggctgaggcaggagaatggcgtgaacccgggaggcggagcttgcagtgagccgagatcccgccactgcactccagcctgggcgacagagcgagactccatctcaaaaaaaaaaaaaaaaaaaaaaacctagtgtatcactttcttattttgcagttcaaaatataaaatctttgaggatgcttgaatttctagacctttatcatatacttagaggtatatttgctgatagttgtgcattgatactgtgatagcttcttattctcccgtgaagaactgatctgaagtcatggagctttagttacctgctgctcttattccaccttgcagtggctatcacattcctacaggttttcaacacagcttcccatgaagttccattcactgaaagatatagctggctccattccttacagaaaaaagaaactaatgccctgcttgccaacttttggctgtctagaatggaatgttattctgcacgggaggaagcacgatggaaaagggttcttctacctgcaggaaatctaatgtttgctttgtagtgaagcatgcgaaaagttgaaagaaaggaagcaaaggaagaggcttggtcattagaagttcagtttgtgtgagatttcctttttttcctttttgtttttctctatcctgttataccatcatggtattttaattttttttttcctagctaatgggtaaattgcttttatattggtgtttgggacccactgtgaataccatggacagattcaccggaaaaaaaaaaaaaaaaaacaacaaaccaaggaggagaaaaatgttgtttcttctacttacttcccatcattttgtgaaggagagtcagaaaagctgttttctacacatactcccttctccctcaacccattcacagtgatttttgtcagcaaactaatatgccattgattttacagttaggatcagaaatatgcaccattcttgacttaaccgatttttttccccctgagaacaatatcatttttacactagagaatatgtgcaaaaacttattatctacaaagctgaatgtattttgcccttgccgggaacataaagggttaaattgaaggctcaacaaagactgggatgaaaagaggacaagttggggggccatagttgtttcctgtaggcattcactgttttgtagccagtggcatttttttttgtcctcatcactagctcctttaacacacctctgggatttgctctgagcttggctgaacactcttgacctttgattgtatagcagggacagctttattttatgaagctcttctgattcagacacattttgacatggcctaaaaagccattcagtaagtagtaaatgcaccctatttctgagtgggatgcaggttatggatgtgttaaggctcaatcaaggttctgttaggaattaggactggtgtgaaactccaggatactgggagagggttgagagtgaggcctgaggtaaggatccgggatggaggaagaggcttgcaatgcctgtggtggacattatctgataaatttcatttagtgatttcggcatgaaacagccatattaaaatgccctttctggcttattaaatagaagctactcagtacatgtttgttgaacttagcttcttaaccgatgataccttttcaaccctgcttctcttcttctataatttgggccccacaagttacccagattatggttgacaaacttgagtagcactgcacattttagtcaagtgagtcatatttttgaaggaaaatgaggtcaaataaagacttggtaaacataaaaagcccctttgaaatctccacacaacttttcaccatttggtttcttttttgctctctttttactgtcacatgaattggtacaagttgttttaaaatctccagaccccaattccatggcccccctcccccctttttaaattgggttaatagtctttaaagtccattttagttctaaaacatactgattttaacacctcattcactaaataaattgctttttttcaggcactataatgcaagataaataaaattgtctatatttaaaaatgtatttaccaactttcaaatataggcttgcctatattttaattgtagtgtatgcatgatgcagacctttgggactataacctttgatttcagcattataaaatgtcaggtcccttggcagaaaccactttaaaatgggtgagacctgaactcaaatccttggctctgacaagtactggctgtgtgaccttaggcaaattacttatttttaccaggcttcagtttcctcatttgtaatatggtgataccaatgtcctttataaagttactgtaaagatgaagtgagataatgggatgtaaattgtctagcgtgaagcctggcctacaggaaaccctcaatacatgttacctaatgctactgtctgaaaatgtgtcccagaatctctctagccaacataaaaacacattttatgatgtaactctttacatcataaattgaggagtatttcagtcaataaatgtttataaataaattaacggtcagatgtattccaagtggaaatggacctgacattttatttttctttgcagatcttatattgcactttaaacacacctaaaattgacatggaaagactcttaggaggacaactaggactagaagatttcatatttgcccatgtgaaaggaatcgaaaaagaagtgaatgtgtataaatctgaggattcacttggtctcaccattacagataatggtgttggctatgcttttataaaggtaagttttaaaaaataacagtgtaacctaattgaggataacatttaagaaaatctaccaggccaaagaaagttagaaatgatcttcagagtgagagcccgctcagcaaggatgcatgaattggtaatgtttcactttcattttaaaaatgttcagatgtcagtttgtgtttactattttcttaatttcttccctttagtttaaacttcccctagaatttagaactaactgaaaggaaagtctaaccctggtgcctactcattatccatataagcttttccatgtctgtaggttttaacatctgatgaatttctggcttatttccattgaattagtgttattttccaactgttcctagttttgactgccttatttacttctttaaaaatgcccttcaaaattttaggaagtatataaagttggatctctgtatctgtaggttctgtattagtggattcaaccaaccacagattaaaggtagttgaaaaaatggcatctgtactgaacatgtatggcctttttacttgtcattatttcctaaacaatacagtacaactgcttatgtagcattgccattgtgttaggtattataatctagagatgatttaaagtatatagaaggatgtggataggttatatgcaaatactacaccattttataccagggacttgaacatcagtggaattttagtattgatggtgtgtcctggaaccaatcccccatggatacccagggccaactgtaattcctttattcaaatacaaagagagcgatatagagcttcaaaggcaagataaaagtttgaaatggtgtgaaactaagaactgaggagaaaggtagtctcatctcttaaaaataacaactctattattgtaatagttataatagtaacagacttatattgaatgcatgtactaggcactttgcatacaatttctcacttaattctcacaattctatttggttggtattatgttttttctttgtatttatttttttgttgcagtataagacatttttaatgtacagcttaatgaatgtttacatacttatccctgtttaaccatcacccagatcaggataaattgcatttctgccactcagaaggctcatttgtgccccttcccagtcaataatctttccccgcaaagtagccattattctggcatctattgccatgaacttcatataatcatatattatatactccactattttcggcttcttttgctcaaaaagatgcctatgagatccatggataggtactatttccaaccttattttacagatgtggaaacaggctcaggaaggttaagtagcttgcccaaagttatacagctggacacattcaggatttggatctatgaggtctgacttcagagctggcacttctattcactcgattaagaattaatgatagatttcatgcaacagggaatattttgtgcctttattttgtccaaatcttgatttgctgatgcattgtcaccattaaataatcttagggaagttatcttcttaactgtaaatgggactttcgctacccacttgatagaatggctatttttagctctgcaaaagatatgactgtgctgaaggttgagtgagtgaccaaatggaaaatctgtgactgggaaagtcatatgggattatccaagggaagctcaggacatgaggcacaggcagcagagaagggcttggaagtttcacaaacgtgtgtggatttttaaaatcttagcctctgacattcagagcttgtctttctattttttaaaaaatgctttgtcaaacatgtgcctgactcagagtactagtcactagccctgtggagatatagggcatgttagcaaaggagaaagcaaggcataatctaaactgccaacatatagttcaacttagaagagagatgcacattatactgtatacatggttgatgaaattttttaaaaattgggagaggataatttcaaacttacataaagattgcaataataatacaaagaactcccataaatcatttatccaaatctccaatttttaccatttgccatgtttgagttttttgttctgtctcatacacacacatatatatatatatactctttaccccttagtacttcagagtgtaattactaagaacaaggatattctcttacatataactacagtacaattatgaaattcatacagtctaatattgatataatacttttaaactaatctatagttcacattgtagtcttatcagcgtcctaattgtgttcattattttcccctcatacaggtccaatttaggatcctgtatttcatttatgtctttttagtcttctttataatctagaatagttgtcatgtctttttagtcttccttaatctagaatagttcctcagccttttataggatgtccctgaatttgggtttttctgatgtttcctcatgttgataaatagattgtgcatttttggtaggaaaattacataagtgatgctgtgtccttctcagtgcaccacatcagaaggtacatgaaactggtttgtctcattgtttgtgagattaacttttgtcacttgtctgaggtagtgtccactagtctttttcactacaaaattattttcctttgtgatacgtaattgtggagagatgctttgatatcatgaaaataccctgttttcttacttgcatggcacaaatttagtatctgttgatgagtcttacctgaattaatttttcctataatggttgaaaaaatgatgatttttctaattccatcactccttatatgtttctctgaaagcattttatggtagggaaaaagctgcccttatttattgtcaacatgggtacatgacttcgtgttttactgaatggtttatagtctgttactatcaattatattgatgctcaaatttcctgagacttggcctgcaggaacccctgtaagtgggcccccatgtccttttgacatggctcctatcattttattgagtaggttcttactttctagaacacaacaagatattctagacccatcttgtatctccttttcccctgacctagaatcaactatttctctcagaagctctgatttttactagagattgatagtcaagttctggtgttagctgtgctcatacactgaagtcaagttctggtgttagctgtgctcatacactgaagtcaagttctggtgttagctgtgctcatacactgaagtcaagattgatagtcaagttctggtgttagctgtgctcatacattgaagtcaagttctggtgttagctgtgctcatacattgctattggagtgcattatttctagatcctttcagtggtagaattagagaacatgtttattagaagttatgaattgggccaggcatggtggctcacacctgttatcccagcactttgggaggctgaggtaggtggataacttgaggccaggagttcgagaccaacctggccaacatggtgaaactccatctctactaaaaatgcaaaaattagctgggtgtggtgcacacctgtaattccagctacttgggaggccaagacaggagaatcacttgagcctgggaggtggaggttgcaatgagccgagatcatgtcactgcactccagcctgggcgacagagggagactctgtctcaaaaaaaaaaaaaaaaaattacgaactcgtaacgatgcttctaattgtcatcctgccccacagggttatttcttggcttccccatcaaaatttttactttcaaagtcattaaaatatttactcattgtagagatctttcaccttcctggttagctgtattcctaggtattttattctttttgtgacaattgtgaatgagattgtctttctgatttggtgcttggtttggctgttggtgtataggaatgttagttagggatttttgtacattgattttgtatcttgaaactttgctgaagttgtttatcagctgaaggagcttttgggtcaagactattgggttttccagatacagaatcatgtcatctgcaaacagagatagtttgacttcctctttccctatttggatgccctttattgcttttttctgcctgattgctctggctaggacttccaatactatgttaagtaggagtggtgagagagagcatatttgtcttgtgctggttttcaaggggaatgcttctggcttttttccattcagtataatgttggctgtgggtttgtcatagattggtcttattattttgatgtatgtatacctagtttgatgagagtttttaacatgaagggtgttgaattttatcaaaagccttttctgcatctattgagataatcatgttgtttttgtctttagttctgtttatgtgatgaagcacatttattgatatgcttatgttgaaccaatcttgcatcctggggatgaagcctacttgctcatgctggattaggtttttgatgtgctgctggatttgatttgcaagtattttgttgaggatttttgcatcagtgttcagcaaggatattggcctgaagttttcttttttggttgtgtctctgccaggttttggtatcaggatgatgtggcctcatagaatgaattggggaggagtccctcctcctcagtagtttctataggaatggcaccagcttttctttgtatatttgatagaattcagttgtgaatccatcaggttctaggcttttttttttttttggttggtaggttatttattactgcttcaatttcattattggtctgttcaggaaatcagtttcttcctggttcagtcttgggagagtgtatgtgtccaggaatttattcatctcttctagttttctagttagtgtgcatagaggtgtttatagtagtttctgatggttatttttatttctgtggggtcagtggttacattgtcttcatcatttctaattgtgtttatttagatcttctctcttttcttctttattagtctagctagtggcctgtctatctaactaatttttttcataaaaccaactcctggatctattgatcttttgaatgtttttttttttttttgtcttgttcagttcagctctggttttggttatttcttgtcttctgctaactttggggttgatttatttttgcgtctctagttctcttagttgtgatgttaggtagttaaggtttgagatctttctaacttttttaatgtgggcattatagtgctataagtttccctcttaaaactgccttatcagtgtcccagagattctggtatgttgtatctttgttctcattagtttcaaataatttcttgatttctgccttaatttcactatttacccaaaagtcattcaggagcatgttgtttaatttccatgtaattgcatgggttttagcaattttcttgacttctatttttattgcactgtggtccaagagtatgtttggtatgatttcagttcttttgcatttgctgaggagtgttttatgtccagttataatatgtggtcaattttagagtatataccatgtggtgatgacaagaatgtatattctgttgtttttgggtggagagttctatagaggtctttcagatccatttggtccaatgttgagttcaggtcctgaatatctttgttaattttctacctcaatgatctgtctactactgtcagtagagtgttgaagtctcccactattgttctgtgggagtctgtgtctctttgtaggtctttaagaacttgctttatgaatctgggtactcctgtgttgggtgcatatatatttaggatagttaggttgtcttgtcagattgaacccttttaccattatataattcccttctctgtcttttttgatctttgttggtttgaagtctgttttgtctgaaacaaaacagggataggattgcagcccctgcttttttttgttttccatttgcttggtagatttttttctccatccctttattttgaatcttgggtgttattttgtgtgagatgggtctcttgaagacagcataccgttgggtcttggttctttatccagcttgccactctgtgcattttaaatgggacatttagcctgtttacattcaaagttagtattgatatgtgtggatttgatcctatctttgtgttattagctggttattatgttggcttgtttgtgtgattgctttatagtaacactggtctatgtgtaagtatgttttgtattagctggtacagtgctcagagaaattagagaagagacaaacacatggaaaaatatcccatgcttgtggataggaagggtcaatatcattaaaatggctatactacctaaatcaatttgcagattcaatgctattcctatcaaattaccaatgacattcttcacagaactataaaaaattattttaaaattcatatggaacaacagtgacaaaaaagcctgaatagccaagataatcctaagcaaaaagaacaaagctggaggcatcatattacccgacttcaaactgtactacagggctacagtaaccaaacagcatggtacttgtacaaaaacaggcacatagaccaatggaacagaatagagagcccagaaataaggctgcacagctacaaccacctgatatttaacaaagctgacaaaaataagcaatggggaagactccctatttaataaatgatgctgggatagccatatgcagctaagaaatgatgctggctagccatatgcagaagactgaagctggacccctccttacaccatatacaataattaagatgaattaaagacttaaatgtaaaattcaaaactataaaaactctggaagacaatgtaggcaatatcattctgaacattggaatgggcaaagatttcatgacaaagacaccaaagcaatcagaatagaagcaaatattgacaagtgggatctaattaaacttaggagcttctgcacagcaagagaaactatcaacagagtaaacagacaacctacagaataggagaaaaatatttgcaaactatgtatctgataaaggtctaatatccagcatctttaaggaaagttaccagaaaaaaaagacaactccattaaaaagtggacaaaggacatgaacacttttcaaaagcagacacacatgtggccaacaataatattaaaaaaaaagctgaacctcactgatcattagagaaatgcaaatcaaaaccacagtgagataccatctcacaccagtcagaatggctattattattaaaaaataaaaaaataagttgctggtgaggttgcagagaaaagggaaccctcatacactgttggtgtgagtgtaaattagttcagccattgtggaaaaccgtatggcaattcgtcagctaaaagcagaactaccatttgactcagcaatcccattactgggtgtatacccagaggattagaaagcattctaccataaagacacatgcatgtatatgtttactgcagcactgttcacaatagtaatgacatggaatcaacctaaatgccaatcagcagcagactggataaagaaatgtggtacatatacaccatggaatactatgcagcattaaaaagaatgagatcatgtcttttgtggcaacatggatgtagctggaggctattatcctcagcaaactaatgcaggaaggaagagaaaaccaagtactgcatgttctcacttataagtgggagctaaatgatgagaacttatgaacacaaaggaggaaacaacagacactggggtctacttgaccccagtcatagtgagactctgtctctacaacaaatagaaaatcccttaaccccaacatagtgagactctgtctctacagcaaatagaaaaaattagctgggtatagtggcatgcacctatagtaccagctactcatgaggctgaggtgggagaattgcttgagcctggggaactcaaggttgcagtgagccatgatcatgccaccactctcagcaagacactgtctcttaaaaaaaaaaaaaaagtcaaactataaaaaatacattcagagatgtgtcactccttctcctaactcttctatcccattacttttccacactccttagagataaccaattttattaatttctgttttatccttcctgtgtttctttttgccaagataagcaaaatggaatgtttcatgagtttgcatatcaccatgtgcagagaccatgctgtgtgattataattttaatgtatgtgctgctgaagtgagcacttggtatgtttttaacttggctggaaataagagtaggttaaagtcacagtaggacagtgtggtaggtgttcaaatgagggtgagcattccacggtgagagaggcattacagtgcggtgcataggggcatggactttagaatcagataggcctgctttcagtcttagccagatcacttatttactggctgtgtaacattggccaaggcattaaacttttctgagccttctctcaagtgggaatgttagcacctactttatagtattatttgggggtataaatataatgacacgcttaaaatgtctgcagtactcacaattaatagctaatattttaatattagttctaacaataaactattacataattaggagagatcaatggcagaaaaatgcattttatagttttgtatggttcacacagatgaaactggtttttttgtttgtttgtttttgtagagacaaggttttgccatgctgctcagttgagcagggctcaagtgatccctctctctaggcctcccaaaatgctggggttacagggatgagccaccatacgtggcccagatgaaactttttaggtgaaaaaacaacctacttaaatgttcatgattttattatctaagtctcaacatttctaagaacaaaaagtatataaataccttaatcagaaaattaagagcatacttataacaaaacctgtatatagttaaggcagcagctggaaaatgttttctgtaaagggcagatggtaaatattttgtgctttgtgggttatatggtctttgctgcaactacttaactaagcccatgtagcacaaaaacagttacagataatacttagatgaatgagcatgcatgtttcccagtgagaacttactcatagacactgtaatttgaatttattataattttcacatcataaatcttcttttgatttttttccgaaccattcaaaaaggtaaaaaccattcataactcatgggccatataaaaacaggtggtggcccatggtggagggtacacatcaccctggagttctgctgtgagccatagtttgatgacacctggtttaagagaatagacttgtactttaattaattaattaatttacttacttacttatttattgagacggagtctcactctgtcgcccaggctgtagtgcagtggtgtggtcttggctcactgcaacctctgcctcctgggttcaagcgattctcctgcctcagcctcccgagtagctggggttataggaatgtgccaccatgcctgggtaatttttgcatttttagtagagacagggtttcaccatgttggccaggctggtcttgaactcctgacttcaggtgatctgcccgcctcaccctcccaaagtgctaggattacaggcatgagccaccgcaccaagctgagacttgtactttcaaatttaaaataaaaataaggatttataacatgcaattaagaaatgaggctaaattgatttttaaaaacccacctgactttgttttaaattgaaatagtttgactaaccacaaaactgtcattctcagaatatctccttcagatctttatgatttgccatacttttgctttagtagaaccacattttagagtgatcatttcgagaaatatgatacttacatatttctaacattttacttgttcatttgcccaaactaagaatcagcaagactggaaatataggaagtcaagggggcagaggattacaggatggaagctaggatctgagcagaggtctgtgaagccagaatagacatgatgatttgtgaaaacaggtactgtttgagatctggagaccatgatgaggtgttgatgagaaacagctttagtagaaataaggaaacggaaaatggaaaaataaggctgtcaaaaaaaaatttcagagttcaaaggtgatagattattttggacatttataacccaaaactttgtactttaggtcagaagaccttgggttctataccttttttaaaaacatttttaattttaaaaattatgtcacctctgtttaagacctaattctgttgtttattagctgtgttatcttgggcaagccatgtaattattgtggcttaaattcctcattcattaaatggaatgataaatatccttttcctaggcttattgtgaagactaaatgagataactatttacaactgtatgactgttagcttattattatgggcgaggtttgaggacagtgttggaaggatcagcaacacaaatctcaaagttgctgatcatggcgactggacatgtagctcagagtctggtgcttaagattttagggagagtggagccgataaggcggccgcaggggcggagccaggggcctttgcctggcttggtggctggctctaccttccctgttttcacctcccgctgcgctaatggctcccaaaggcagctccaaacagccgtccgaggaggacctgctcctgcaggatttcagcggcaacctctcggccaagtccttcgcgatcttcttcgggaatgcgttcgtcgtgtctgccatccccatctggttatactggagaatatggcatatggatcttattcagtctgctgttttctatagtgtgatgaccctagaaagcacatatttggtagcctttgcatacaagaatgttaaatttgttctcaagcacaaagtagcacagaagagggaggatactgtttccaaagaagtgactagaaaactttctgaagctgataatagaaggatgtctcggaaggagaaagatgtaagaatcttgtggaagaagaatgaagttgctgattctgaagctacaacattttccattttctattaacaacactctgttcctgttcttggtcatttttgcttcttcttcgttttgaagaacttcaaccccacagtgaactacattttgtccataagtgcttcatcaggactcatcgccctcctgtctactggctccaagtagaccatgtcagcttcaccccccggctttgtgtctgtgggtggcctgtggtatatggaaaagtagcagggtgttcaggatgggagacacacaagatgtttttatagtctagagcctttaaaaaacccaagggaatgtaattgaaaggggaaaaaaaagattttagggagagtgtatgctgccctagacttctgctgacatctgtgatgagaaggcagaattctctaaatatatgggatgaacataatggaagatattataataatgatctgaaatggttggaaacctctatgtttaataatgtaaatcctatcttccaataaataaataaatcttctctaccttttgcaccatcaagcttcaaagacaggtgaaagttcctgagtgttatagagaatagtataagtaactcagtaaataaagtatagcattaatgcctctcttttttccttcttattcctttgcatctgattagtgcctttggcaatattattaatctctgtcaagttattttatgattatcaaagcacattaggtttcagaaacttgtctccattgctcccgtattgtttattctgcccactttggaggctaaggctcaggtaacccataaaatatataatccatgtctccaactttgcttctttatctggttcatcttctccaagtttcctatattgattttcctgtgtcttcattccagattcttatctgctgcctctgatagtgaaatgtgctgtgacttttctcttgctacctggattctcaccctgctgtctgctctgacttccggtgactgcctttcttccctctgggcactcttctggttgctgaggcatctctaggattactgaagtgactcatgggcctctgcaaccctagatttctgttactctgacctttaattccctggtgagattcaggtgtgtcttcaaagtctttaacttttatataatgcttattttaaataaaattgtaactctaaatcttaagctaaaaatactgtgtggtgagactctgaaatttgtatggtgtagttgaccaaataaaaaaataaattcaagatgtatcaagagataaattagaataaaaactaagaaaaaaaatcaaagtatagattattgaattctttgatgaattatgaattgtgtaaaatatttaatagttttttcttctttagactctagtcttttctttaatcttgtttatttttctatgacagttgagaaactctagttgtactgagtgattcccattgtttctgttagcgatataagtttaatatgggtttctaataaaataatgttggtagattatgaaacttctggtatctttgtttaactatttctaatgacagtgagctctgtttaaattggcattattgtgacatttgcatatagcatgttaacagccactattagaatgaatgaacatagcaatattcttaaaatttgggataaaagagaaatctattttgagttttgatttataataatgcaatttaaacattaaaaatgcttaaccttcctaagttattcttgttcctgatgacaatatgacggagatgctggaggtagttgagatcagttttctcctagctcttggacacaatgatcaatcaccctgctgattcagaagatgttatacttccacctagcaagggtaaagaatacacaacctttattacacaatagcagccactcctgatattgctatcattcctatgaaggatttgggacttctgagacagattatggccttcattttgcctcattcctcatcactgtggaagaacttgtacatcctctgcagggctgttttctgcaattctggaagatttttctggagctcctgcccctaaaatcctttcagaaattcttggtgccatcttgggaatactagataccattttgatactttaccctacagatgtattgtagagaagtaagatagatttaagaaagaccaacttgaagtttctccttggggtcctacattctgttcatctaaaatacataaatgaaaaacaatagcatcaaatcacccttactggctcccaaaatgataaccatacttatcttttattgggtatcaggcgtcttagctaagatggtattattctttgtgtctttgcatctgtaactaaatgcagccaattgaaaaagctcaagctctattcttatgtgatgggcctcaattgaaatgattcagtaatcactaatgaagggactttgcagatattgtgctaggcacagacatgcagtagtgaataagaccatctctgtcctcaaggatattagtttagtaatggagactgagaagtaaatgaacaatcgcactgtggtatgttgaatctggcaaattacttgatcttctgaagctttaatcttcctgacctgtgacatgagaatctcataaaggttgttagaattaaatgaaataacaaatgtaaagtgcttagtttagaattcagcatatacagcaaaacgtactgtagaagcatgagagtggcaccttacccattcttggtggagtgggttgggaatgtcaggaaaagcttcccagaggaggtggtgtatgagtgagctgaattctgaatgataaggaagacgaagaatggttggaggtaagatagtggttcttggttgctcagtcttccatctctaactgagcatcagactgcattgttatgtcaatacattgtatttaatgtctcaaaagcataaaaagtactgttacacagtttttttttaaacctgtagcatctgatattcccaggcagtctcccatccaagtactaaccaggcccaaacctgcttagcttccaagatcagatgagattggtgcattcattacacagttctattttatattatgttatcatcaatttcctttcagagaattaaagatggtggtgttattgactcagttaaaacaatctgtgttggggatcatattgaatccataaatggagaaaatattgttgggtggcgtcactatgatgttgctaagaagttaaaggaattaaaaaaggaggaactctttactatgaagttaatagaacctaagaaggcatttggtaagtcaggggttggtgggcgggtgtgtgaaatgtttgctttccctggtttatctttctaagggaaatgagtactgtgatatggtgctatgtgcttttagtgtcttcttatctaacatatcagttaaaaacatagaaaatggtagcactacttataagaaagacaactattgaaggaagaaaaaagagaaaattattgccttgtaaaaggacattttccaaacatttgaaattacaaagtctaatgtctagtgactgaatttgatgtggctgttcctatctctgagaacagcacattgtattgttttcattttgctgagcagtaagatttttgactgagcttttaaaccataataactgttgctcatggatctcagcagcaaaaattatagttatatacagaatggtatttaaaatagttatctagtccattttaaagacccccttccccaatacctttcctccattggcattttgaatttggcagcatgggatggtatgaaattatttccactttggggtgacatctgtacttgcttggttttagccatgacagctgtattccaactgttgttcaatcacccagggctatctcatctacagaaaaatgtgccagcttctctcttaccacccagaactattttaataagccaaaccaaggcctagcattcatcagcgttaaaatatctgtagcagaatcatctcaggcttgctgttactcatcatgaccccacgcaccctatgttctttcctttgttcacagaacataaatattccatttagtttgtctctaatgccattttctcagggcagttattggaaataatggaagaatgcagtggatctggggaattatgttttctgtgtcttagcaagtaagtgacaggtcctaggcatgtggaattagaattttttctctgcttctacatgcttctgcaccatttaacagaaatacaagtgtaggttatattacctgtgggaggcagttttccagaaggtgtaagaaaaagatgccttataccagtacctcctggagggagcactctaggaactacctctgtagatgctgtgattctgcctggtgccttgcagcatctgagctcacttctcacagaggaaggaaagcagcactcaggtttctatccagtaactcctttcaagatggcttcatttggtaacctaactccccagatagcatggtgaaataaattgacagggtgtagatggtttgagataaatattcttatttgatttagactctttgtaaatcaaagccattctattagcataactcaagaaatctatttttttctgtattgatctccactacataatctgtttccagagtaaatttttctgttttttttttttttcccattgtctgcatctagatcttttggtcctcatgtctttgtagaaagttattgatataccttaacttggatgctaggttggtgatagtcttaaatgttgcaaaggtcgttgtatttagctattattgttccatgattagattttcccttcagtgttgtagacatgagtagagtcagtatacttcactgccttatgtacctaactactattgaaccggctgttgcctcatgaaatcaatggacacatttgcaaagtaccctgagtaggattttcctaatagaggtatattatttgagcatcctgaattctggtagggctgttggttagaacatccagagattgactttggaggaataagtttttattttccaaggtttctatggaagtttaactcaagctgctggtctttatgcattttctgtgctgtggattgattcttgactctgggccctagtgtgaggggtttctttcttaaaagtaagcctggctgctctgcctgtcctccagccctgaatttttctgcttattgttttgcctctgggataaagacaaagctactttgtttttcatcctttggcttcgtcccagtgcttagctctttgccagagaggggagcatatatcagggggtacttggggaatcaggcttcccccaattctcttggttctaatcttatcttttgctatgtttcctttctttttttcctgtattttctggcattattattgactcagggccaagaattcaaatttcatagtccttcatgattgtctgattctctgtcctcttggatttctaccaggagaagggccagtcttagtgaggcagagttttctctgcattcagataggccaccttggctgtagctaagtcacttataggattttaacaaaagctgtcagaaatggctatatacaccaatattttgacattttcctaccaacttccctaaagacttagcctggagaggcatgtggactatatcccaaaacacaagaggaaggagcatagttggctgctttgcaatggcgtaactaggactgcaagcaccacttctttgtagtggttagggaaatcctttctgcctgccttcatttccatattttaggtccaccactagctacactccacttccaggggccattatatgtgttaatattctttgatggagagctacgtaataaacactgtctaatttcaggagaaggcatttattagagactaccatgtaggtcccagaaacagtcaattgagccttgacaaggtcaggaaccaagcctgtttcaggggtgtgtgtaccaggaaccattcatggcactggctgaattgactcttggcaattattttctgttttcatatcacttcactcaggattcaaattcctgggagaggtggagcaagtaagtaggtcttgtacccatcttgataatggggaaggcaggctatatgatacacctaccaaaatcacacataacatgaagggataaatttccttataggtaggaaaaaagtagcagatgcccattttgctatttcttctaagctgttatatcttgttctgcagccacagcagtattgattttctcttgattttgaatctgactgtagccatgtatgatatctgtcagtctgggagtattggaatggatttggagggagaagcgtattgtcaattgttgtgggtgtttgaccttaaggattttatttttctgctatgagttgggtgccacatacatagctgtttggcagtggactatctagagatgatgacagcatccaactttctttcagagaaagagtaaagtcacattttccttggtgctggccatcagatttggaggggaccaattttgactatacttaccaattttgactatacttaacaattttgactataattaccaattttgactatacttctaggaagatttttaattatctgtaaattatttttaatttatctatctcacaaattatttttaaattatctatctcacaaattattgagactcttctgtgtttcaggtactctgtgtggcatagaaaatactaaggaggaagactaagttatggctcctgcctttcgaggagctcatggtctaacaggaggctgttatgggctgaattgtgtccttcaaaattcacatgttgaagtcctaatcttcactaccttagaatgcaactggatttgtagataggggctttaaagatgtaactaggttaaaatgacatcatttgggtgggccctaatccaatatgactggtgtacttattagaagaggaaatttagacacagacacagggaggatgccatttgaacatgaagataactatctatctgtaagtcaaggagagaggcctcaaaagaaaccaaccctagagaaaccttgatcctgaacttctggcctctagaactctgagaaaataaatttctattgtttaagccacctagtctatggtactttgttatggcagcactaggaaattatagaggataataggaaaaaaattacagtaccagttctttgactatggaagtagaccttgggcttcctaataatctagaaggtacaggtattttagcattcctctggccttgggaagatagcaagagcatactaatatgtttccattcagacatttgttgagtaattagtatatgcttgtcttagggtattagttgccctagacaataatagttaccatttattgaaagcctactgtataccatcaccataccacctgcttggtacatgcatgaataagatccagatctaggaactcatgtctagtgagaagagatggatatgaaaaaaataaataaatttaataaaggcgattagaggtgctaaaatatactggatgtgtaaaggtgggagacatcaagtgtgcttaagaagttcaggaaaagctttcttttcttttcttttctctttctttttttttttttgagacggagttttgctctgttgcccgggatggagtacagtggcacgatctcagctcactgcaacttccgcctcccaggttcaagcgattctcctgcctcagcctcccgagtagctgggactacaggcacgtgccaccgtgctcggctaattttttgtatttttagtagagacagggtttcattgtgttagccaggatggtctcaatctcctgacctcgtgatctgcccacctcggcctcccaaagtgctaggattacaggcgtgagtcactgcgcccagccaggaaaagctttctaaggaaagagatttgagttgagtctgaaggtatgaatggtgcttacttagtggatgaattggggaaggttgtcctaggaagtgggaacagaataagcaaagttacagaggtacagaatagcatcatgtatttgggaacaccttgtttgccagtgtttttggttagaggttataggtggtggcgtcacaggaaatgaagctcaagagtcagtagagaacaaatatatcaagggccttatatatgaagacaaagactgggcaatgaagaggcagaggggtaacatggtgagtctttaattttacaaagatattttggagactgttagataaagggatataagatagagtttaggagatcataaatgttctattaacaataatagctataatttgttcagtgtgagagacatgaattaaggcagtgcctgtaggcatgaagagaagagaaatggtttggaggaatagatggtggtgtgctggagccatttgtacacatctcttcccaactcctccttcattgacatcaggttaattgttttaaatgagctataatgggatatttataaaagagaaataggtaagccctgtaagtcagggctctttattttaatttttttagtgcagagagctgattgttaaatgtacctgcacaccactgaataataagattgaattggtaacctgttggacatagaagtaaaggaaggagagactgcaaatgatgacctcagatttgtggcttcagggagggagtatgctgtcattctttgagatgaggaaagctggcaaagaaatagatatgggcgaggagataggataggaaagaaattataaatacaattttggactaaatgaatttgaaatctgtggaacgattcagttagacttgtacaaaagggctgggtgcggtggttcactcctataatcccagccctttgggaggttgaggagggagggtcacttgaggtcgggagtttgagaccagcctggccaatgtggtgaaaccctgtctctactaaaaatacaagaattagctggaaatggtggcaagcacctctagtctcagttgctcgggaggctgaggcaggagaatcacttgaatctgggaggtgggggttgcagtgagctgagatcacgccactgcactccagcctgggcaacagagtgagaccctgtcaaaaaaaaaaaaatacacacacacacacacacacacacacacacacacacacacatacacacgaggtagatgagcattgataattggggcctagagaatgagatttatgagtaattttctttgattggtcgcagaagctatggaaatagattcaatcactgagagtgataaaaggaccaaaaacagagcagtgaggggaacatcagcatttaaggggcagaaagagaaggaggagccagcactgaggaatggccagacatggaggacctggccttctgggtagcctttatccaagtactcaagatcaagtcacttgtcccacgagcagatgttccattgcactttcccaagttggctgtggggctctgagggaggaataaaggccattagaaaatgtaccctcagaatcttctgtgctggtcagaatttaaattactgtttttcaaccagtaggtttcaaccagtgtgtttagaacacaaagtagaatagagttgaaaatattgtgctttgtacattgcaaatattgtttcagttacaaataaatatgtgtatttcagttttattatctttgtgtatatttatgggtcatgatataacgtatgtattttttactgtgggtcacagaaaaaaacatttgaaagccactggcttaaatgactcccttgttgaaagtttgtagttgaatgggaaatctttcccatacttaacatggttccccctggtcagctggttactgattcaaattttccttgttctagccatgagctgatggcagcattcccagtccttatcaagtatcggctggaatgtctgtagtggtattttttagggcatggctcacttcctttctccttttgccaatgaaaaggagcatggctttacaatgagctcaaccttgcagagtttgccctgtaaacctagattttcccaaggccatgaaaatccctcttccatttaaatgactctaagaccagacaagaccaactcatttgttttcctataaggtcttttaaatgcagaaaaagaacaaatccataaagctttgatttggttttacttaaatgagtctcgacttcatttatcctgcaaatttccaatttgtgattcttgcgtgccctttatggaaagaggtttgaggaaggaggcctgaaatatttctgtaagagttttcaaaagcaggaagaaaattggaagaagaaacttacctcctaaagcatttatggtctttattttagggttggattttgtaacagatcattgggttatatcttcttttagaagattcatttctgtgcggtgtatccatcagaataggatgttaagtatgtgaagtgcatcttagtcttttgagtcattcacagctggaaaactcggacctcatcttcgtgattcagcttaactgatgtactcacttcaaaggctaagcctatttgatattaagagataaactgtggcttttaagttttatatgactttttggatagacatttcaaacatttaaaaattactttttattattcatgctgtatctagggaaaaaatttcaatcaattaatacttttggtaccttttcatatatactgaattctacaaaatatatttgggaatatgaaaaaagttacaaaagagatgataaatttcagtagttaagtgtgtagtctctgccagggactggcttatgatatgtgacattgggtaagttatttaacctttctgtgccttggtctcctcatacaaaatgtgaagatgtgtctaccacattgagctgttgtgaggattaaatgattaaacatgaaagaatcatagagcagtccctggtatatagtaagtcttcaataagttatctgttattattactattattataaaggtgtatccttttctttaaggaataattttagaaacaagataaacccactgaaacaggaaaagcaatgtggatgaattggtgatcaacaagtatttgttgagaactctggcactgtttggattctggaaagacagatggcaatatcacatctcatatcaactaaggaaatatgtcagtacatcataatagtagctgccattcgcttttcctaggactttctaagtaggaaatcatttagtccttacaaccaacctaaaaggtgaagcagtttgcccaaggttacagctagtgagcgagggaggcacacttctaaaccaagcagtcagcctccagagccagctctctaacagctgttacagtgagtcaacatgcttgctgtcctcagggaacttacagtttacataaagaggcagatacattaagaatcaagtaattctactaacaataatagctaccatttgttgaatgaaatatagtatagcagtgaagagcatagactgtgagctcagttacttaggtttgattcctatctttgctgcttttaaactgtgtgatttggggtgttatttaacccctctataagcctgtttacttacccataaagtattttgaggatgaaatgagttaatgtatgtatgtgcttagaacagtgttatgtaattgcaacccattgtgactaggactactgctattatggcctgacttaataatcctcatgccattcctatgagggtttttcagctaggtaaactgaggcttgggcagttaattcattaagactgcccagtggcaggcgtaagtgtgggcatagcactccagtcctgtttgctctcgaggcttgtgctctgaacattatgtgttactgcttcttcagaacataatgcagaccatgatgcatgctatagtgcagatttaaagagtgaagtttatctgagcgctgacttgtccatgattgggaggggttctaaggcttagagagtgatagggattgagaggtagtaagattggaaagaaactccctcaacaaagaaagctatgagacaggtgatttatggcaggtcccaccagtaacagggatcaatgtcctgttctcatgaaaggcgacaggacatctgatagaatggcataaggatattagagcttttaagtgctgtggctttgcgatctcaggtgaaaggcccttgtacacactgggtgtgggtgtgggggtggcctgtgagtgcacacactgacttggacgtagagcttcatggtctggtctatgatggacagagtgcagcatcagccttttgaagcctgggagatggggagaggccttcaaagcaaaaccaagagtaaatttctcaccaaacctgtgccatgccagtggtgtgtagaggggggagagggggccgggggtggtgctcaaagtcagattcaattaggcatttcttacattcagaattgtggagtaaaatttaaaagccactacagaaatctgtagcaaatcaggctgcaaaagccgctcaggaccctattaataagagctctgaaaactcttatttttcagagctcttattaatagctctgggttctggtggggaacccaggcttgttttacagagtaatagggaatcatttagatgatattagaactgaagaatgacatgatgaagcagatatttgggaattaagcccaggagaccaatgtggctatatatgactagaggataaaccatgtaagaggctgttggaacagttcaggaggaaatgatcaggactgggattaggggcagcagtgggaattcaaaggaaataaaaagtgtgagtaatattgtaagggtaaaaatggggtaggaggtggattgatgacacttagctaaaggggagaagggagaaggttcagaagcaaatgtcactcccaagatttctatcctaggagcctgtgataacaatgatgctataattggaaatgatgcagttgggatgtagaaatggtttgggggacagtcagggataaaagttcagtttcaggtgtattgcattttatctgacagtgatactctctttcatgtattttttggcaaagtaagtgtacacagtgacagattttgaggggcagagcatactgtcgatcatcttattatgtagtagagtttttcctggcctcttcgtatctagctacactttggcttagcatttgtcacaaagatactatgggagaagatgaataaaaaaatccaagttcccttttgtggagtgtcacagatgtgttagacaagtgctgagtgtaattgataaattggttttcaaggtagagacccagctggatacctaaatatagatcctttctactctagttgtaaacttgcattaaaattttttttatcgaatgctcagtttttaatctgagaaaaatgaaattattataatctataatactaaaaactttgtaagctatatttttcaagacatttaccctaaacagtgattgatgtcttgtaactgtaatttttttttttttttttgagatggagtctcactgtgtcaccaggctggagtgcagtggtgcgatctcagctcactgcaacctccgcctcctgggttcaagccattctcctgcctcagcctcctgagtagctgggactacagacacgcaccaccacgtccagctaattttttgtatttttagtagagacggggtttcaccatgttggccaagatggtctcaatcttttgacctcgtgatccgcccacctcggcctcccaaagtgctgggattacaggcatgagccaccttgcccgaccagaaccgtaatgttttttaaggaccatttagagttaataacaaccatgaataggaggtacataatagttttcaactgtttttaagcttattaattaaaacagcaatgtgagatgaaggggtaaaaaatgatgcttaaatgtaagtggcttttctaatctgaatagtatgactataatgttatttattagaaaacagcaattatataaataatacatattctccccaagagtatttttacaacgggaattgtcatttaattataggaaaatggatctaataaattatgttaaaaatcgtagtcagagtatgttttcagataagttaggcagataagcaatttgatttatgtgtggaaaaatgtttgtgaggctgggcgcggtggctcatgcttgtaatcccagcactttggaggctgaggtgggcggatcacctgaggtcaggagtttgagacagcctggctattatggtgaaatcccctctctactaaaaatgcaaaaaattagccgggcatagtggcagtctcctgtaattccagctacttgggaggctgaggcaggagaatcgcttgaacctgggaggcggaggttgcaatgagctgagatcgcgccactgcattccagcctgggtgacagagtaagactctgtctcaaaaaaaaaaaaaaaaagaaaaaaatgtgaaaaggcagattacggcagggtgtggtggctcacgcctgtaatcccagcactttgggaggccgagatgggcggatcacgaggtcaggagattgagaccatcctggcgaacactgttaaacaccatctctactaaaaatacaaaaaaattagccaggcatggtggcaggcgcctgtagtcccagctacttggaaggatgaggcaggagaatggcatgaacccagggggcggggcttgcagtgagcagagatcgcaccactgcactccagcctgggcaacagagcaagactccatctcaaaaacaaaacaaaacaaaacaaaacaaaaacagattacaacacaacgtgctgtaatatcccagttttgcaaaaactttttaagtgtagaagaaaaataccttacagtggatttttaattttatttatttatttatttgagacagagtttcgttcttgttgcccagggtggagtgtgatggtgctatctcggctctctgcaacctctgttgcccaggttcaagtgattctcctgcttcagcctcccaagtagctgggattacaggcatgtaccaccatgactaattttgtatttttagtagaggcagggtttctccatgttggtcaggctggtctcgaactcgcgacctcaggtgatccacctgcctcggcctcccaaggtgctgggattacaggcatgagccactgtgcccggcctaggtggcgagtttatggacggcttttctttctctttccttttaatttcttctccctccctccctcccttcccttccttccttccttactctccctccctctctttctccctccctctttccctccctttctttccctacctttttccttttctttccctccttccctctctcccttgctctcccccttgctccctccctccctccttccagggtctcactctctgagggtggagtgcagtagtgcagtcacagttcactgcagggctcaaaagatcctcccacttcagcctcccaagtagctgagaccacaggtgcaggccaccaacctagcgaatttttcagtgttttgtagagatgggatctcactcctttgcccaggctggtcttgaactcctgggctcaagcagtatgccagccttggcctcccaaagtgttaggattacaggcatgacctaccatgcccggctgactttttttctttaggcttatattttccacattttaaatataaaacaaacacattaactttcataacaagaaaacaattattttaaaaaggaaggctggccaagtgtggtggctcatgcctgtaatttcagcactttgggaggctggggcaagcagataacttgaggtcaggagttcgagaccagcctggctaacagggtgaaaccccatctcttctaaaaatataaaaattagccgaacatggtggcacgcacctgtaattccagctactggggaggctgaggcatgagaatcacttgaacctgggaggtggaggttgcagtgagctgagatggtgccaacgcacttcagcctgggcaacagagtgaaactctgtctcaaaaaaaaaaaaaaaaaaaaaaaaaaaaaaaaagagctagcattctaggaagtagaagaaacttattctacgtattgtagctttacagttttcaactatatgatgctcctcattaaacaattttattataaatagttccatgtgagaaatgtggtagaatatgttatcaactctttacatttgcaggatctgttttggtaactatttttcttaactttgtaaagtctagggggaaggtccaggctgtgtaataaaccagtaataaaggtgaacaataatttttatttcttgaattcccatgataaaatcatattatagggtaaaataagtgaaaggataaaacgaaatattttagctatcattctttgttaaaagaacgaccttttacctttccaaattagagtctagaggtttgtaatctttttttgtaacacagtctcctctggattaaaggtatgaactttttccccagagatgcacattaacttgtgcctgcaatttcagggagttatgaaaacagcgttggggctttcttaaatgacatcttaactaaagaacaagaagatttctggcacagttattgcacttctgatatgcatcacaccctgttctgtcttatcgacggaatggttgagccacctttgtgtgcttgtggggttcattcatatgtgggcagctcttttgatccaatagacaacaactgacaccttcatgcaggtggcatcagtatatgcctccttttccttgcctttggtctgtctcagcaccctactaattgtatttttttaaagcctattctaaagaagcttcagaaatattggagagaggaaggatgcagggagaaagggagtgtcgttaaaatcttaaattctgagacacaagctagattttgtgtcagctatcctgaggagtgtgtacataggttgtgggtgaatgtggggtagggagcatgtgtttatggacaatgctgttggtatgtatctaagcattggaaggtcttttcagatgggttgcctcattacttggacagaattctttatctgtgaggtttctttcatttggagaccatggtaaaccctactaaactggcttaagcagaaacgggaattgtacaaaccagcagtccatgagtgatgctggcattagcaaagctctgtgtggggcccatacaatgtgactaggactcagttccttgccttttctctcttctgatgtcctgtctgatgtacctgattcatcatttaggtatcatcatattaaggttagctccacactgtgtcccaagatggtggtcagcaactgctgggaccatctgctttcttattcatgcagagcagaaaaggagagagactttggctcagaatttctagcaaaagtcctgagatttattctgaccttgcggcctttagtcacatgcttgcctctgaaacaatcactgtgatgaaggggatcagtttggcttagcccattcttgtgtcccatatctgaagctaggagcagtcagcttcccctgatccgcagtgatccttaaatgaccaatgggtgctaaaacaaccaatgagagttatttaccaatggcaactcataacttttaatagaatgcaaaatgaggtagtgtttctagggtggacctgcctggccttttattccagctctgcccacttacctggttgtctgtgatcctggtgaaatcatttcacttttccaagccttggtttcctgaatcatgaaattaggataataatcatacctatctcataatagttttatgagtattaaaaacatgtagataattttatatgctgttacctgggatatagtcaatgcttggttaataaaaaggcattacctttgacttaccccaaataatttaccttgactatccctagatgaatatagtgtgtttttttttcttttgaaataaaattggtcttgaagaataatgctagtttagaaccaactcaaatgtccaacaatgatagactggattaagaaaatgtggcacatatacaccatggaatactatgcagccataaaaaatgatgagttcatgtcctttgtagggacgtggatgaagctagaaaccatcattctcagcaaactgtcgcaaggacaaaacaccaaacactgcatgttctcactcgtaggtgggaattgaacaatgagaacccatggacacaggaaggggaacttcacacacgggggcctgttgtggggtgggggaagggggagggatagcattaggagatatacctaatgtaaatgacgagttaatgggtgcagcacaccaacatggcacatgtatgcatatgtaactaacctgcacgttgtgcacatgtaacctaaaacttaaagtaaaaaaaaaaaaagaaacagcctataatgcttgataggtagccatctgtagagggaacctctataccttgagagatatctgaaaatgggggcagaaagccacaaagcccaggtagagctgttgactctaattattattgctttgtagaaatgtgtcattctccaagagaaaccaaaaatttgaatttttatgagaaatcacccaatatttaaaaggttgcaactaattaaaaaatttgaaaacactgcacatccaacaaatatgtctgtatactatatgtaactgtgaactccctgtttgtagtcttgtcctgagagaattgtccttaatgccaaagtcctttgctctggtgacatgcacactaaacctctcaggtaaccctgtgagtagaaaacttcaaaggaatcatttctggaagggatagagaacgaatgaactgagagttgcctaggtgggagggacttggaaatgtaacctctccattcatcgcttttggaatctttgaacttgctgaactatatagcctggaacactttcctctctctactcctcccctttacccatctagccttgctgtctttacctgtgatggttgagtctctgcttatgaatcactttctccaggaagtctcaggcatgtgagaatgaagcatgggagcccacttgggcctttgataacatctctccctatggattaataaactgatttggtgagatctgttctttgtgaatttggctagtgtgaatcaatcgctaagattcagatcagctctgggaacactgaaaaaaataagcattcctgggtctgcaatactgaggattgctggtgcgcacatcctgccgagtgctgctgagttgccatctggcccaccctttgatatttctcttggtgctctgtaacttcagagatggaaagtacagaaactgttggttgaatttgatgagatagctgagttcaccctgcatgggtggttaggggagggagctgcatgtttacttttctgggatggagtggtgatatggatggtcacttgcccacatggtgtgataaaactgtaataggggatattggggcggcggggggtactggacagagaccacagagtccaaggattttactcttttctctgggcccctcagtgggctcttcttccccttcctcactagaaggagcccattacaaagtgccctgtgaggggctgggcttacactcatccactttagaggacctcagatggagcaatgggaggggccatctgttgtttccaccctcctctaaattttagggagaaatcatactgttttaaagaagaaataaaatagaataaagaagagacctttgcccctggcctttcaagtgacagctttctgaacattttacgaggagcctttgcatgtttcattttttagagagaaaatctatataagttgttttgttaggagacagtggaagggcacatttccctctctccaggttgaaacacaccagcagaagcaaattataaactctagcagcagcgttctattaacgtgagccaggccaatgggcaaagcatctttcatacagtggtcatttgagtacttaaaactatgctgtaaataggtgtaaatattttgtaaataagaacttattcctcaagttcacacaacttgcaaggtgaggaactggggttttaactaaggtgctctgattccaaagtccatgttcttaaccacaacactgtggataacagtacagattgaaccaaaatactaattttcttataagtaatcccagtagatatcagtgatcagaatgcaattgagagcattacttacaagcatcgtgataccacatttgaaaacagagtgatggtagagataatcagacctcagtactaaagtccttgtaagatgttttaagagagccagataatatgcttttgagaagtcaggaaaattttatcagggtctcactttcagcagagatctaatcagaaatattagaacaactttcatttcacagtttggaactgaaagtaattggtttgtttcctttttgtcaccaaaatgccactcattatttttttctcctacctcattttcacacaggccctcagcccactacagtgttccccctttacaactatttccagatgttctcaagggcttcacatgtgctccaaggaagtgtgatcctgttaggcaaccttgttgaccttctctgtgtccatagcatcccattcttccctctgggcatctttgggctatttcttgttcactgagcaacttggatacagcagtgtccatctgtgcccacttcatgttgaaattatggtctctgcccaggccccataggtgctgctccatactccaggccaaccagggctctcatgggaccagaacaaggcctcgttctgtgcggaagtggggagaatatacagcctccccactgcttggtccttccgtcagttgaggatctaagccgtgttgcatgtgctactcctgaaaacagtgcttttgtcttctgtcagcacttctttccctagggccgaggcacaggctgttgggaggaagacagatcctttctgccttttccatttccctttctctctacctgagcttcatcaaatagcaaaaactaggggtttgcttgtttattgaaaatgtcagttaaaataggctcttgtaaagaatgatatatgtatatataaacattttattttaatttaaaacatagatgtgaatagtgaacagcattcgttatttgggtgatgggtacacgaaaagcccagacttcaccactagcagcatatgcatgtaagaaaccggcactcgtactcccgacatgaaaactaaaaatcaatgtttaggttcatagcaaaactgaacagaaagtacagaaagttcccatttctatgttttaaaacatagaagtgtacattcttttatcactcttaatgtaaaaggcctttgagtagaggacacaaattggaattctaagatgtctgtcttatgtaatcacaaccttaatgcatatgtgtgggttctatttcattaaaaaaaaacagatatgtgaaatgatggctgtttaaaaatattttttcttttcaatcatggttcactgcagtctcaaactcccaggcttagatgatcttcacaccatagtctcctgagtagcttggactacaggcatgtcccatcatgcctggctgatgaaatattttgtttttcttttctttttttgagacaaggtcttgttctgtcacccaggctgaagtacagtggcgtgatcacagcttactgcagccttgatgtcctgggctcaagcaatcctcctgcttcagcctcctgagtagctgggactacaggtacatgctaccctgtctggctaatttttgtatttttttgtagagatggagtttcaccatattgcctaggctggtctcgaattcctgggctcaagtgatccgccacccttggcctctcaaaacgctgggattagaggcgtgagccatggcacccagcctaaaatttctaatagagacagggtcttgctctgttgcccaggctggtcctgaacttctgaggtcaagtgatcctcccgccttggcctgctaatgtgttgagattacaggtgtgagccactgaacccagccaaaaatattttttctaatctcctagagtcatcttgcccatacctatttttttttttttttgcaactcattcttatggagtctatccaaggcagtcaaccatcaacctagttttcatagcattaataactccttgttttacactcatttcatcagctcatgtacttttaaatcaaagcacataattagagtaacagatacaattgccacaaaaaggtctgggaacaaacctgattgcttctaggctatgtgcaactccactgtgggagcggttaggcacccacaagccgtgcattcctgtgccctaagtgacgtatgacaggcggacggccagtacactcaactgggagccctggtgcatctagcgagtcagctagctagctgcaggtgcaggctggttaccagtgcctactgtatccactgcatccctgtcatagctcagccccaagagaagccttgtgcagatccgttcatgtgaagtgactgatttagggcttggcctggttggccagacgtgcttagacaggccagcaccccaaaagtaggccaggctataaatatatgtggtctccaaaacatttcaaaaacacaaaacctgttttttcccctgtggatgaacaggaccatcctgcttgtttttgtctataaacagattgatttatgtacctggatcataggctcatagacaaacacggcttctgtttccttagaggtgaaaactgccctctggaggctggtccaagccagaatttaaaatttaacttttgctttggtgccaccaagtggttagctttgagatggcttggcaaatacataatgataaaaaaaaaaaatctgggatgtataggaggagctcagaggatttttagggcagtaacaccattttgtataatgctacaatggtggatatatattataatatacatttattcaaattcatagaatgtgtaacaccaagagtgaactctaaactatggacattgggtgattatgatgtgtcaatgtaggttcatcagttgtagcaaaagtcttactctggtgttggaggttgataatgggagaggctgtgcctgtgtggtggggatagggagcatatggaaaccttctgtactttctgctcagttttgctctgaacctaaaactgctctatcaaaaaagatttattaatgaaaagtcttctatgctacatacattttcccttctggctaccagtgttgcaggtaagagcaagataagatagaaacgtcatgtagagaggccagctgacttcttgggcagggatgatacaacctttatgaagccccacactccagaggctgggtccttagctttgtaagtcccagaaacctttttatttttatttttttttcaatgtatgtagagttgttcagtttttcagggctatatcatgctcaccaaacttacaagagacactttttgaaaagtcagattggcaatatattattttacaattagaaatgtgtaatcaatggtaaaccaaagcacatgtggtagatgagaagttcatttttcaccctgcaggaaatttatatgggcagacaaaccataccaagtaggttgcttggtgaaattgcagtagggtcggggaaggaggttgcatgtcttaaggttactaccattaagacgaagctatcttcaccactttagggatatacatgactctgggctggggatacttacattgctaggcagtacggaatcctggacagtgctgatgataggtcaacttaatctttttctttggatactctttttgaaactctatgctgagtgcatgataattctttcttccctcacacaggacatactataactggcaaggccaatactgtaggcttgctgatacagctctggtctcctgtgaatgttgggtcacctggattagcatttggatgtttcccaaatcatcagccaccatttataggtttttggttaggcggggctagtgtactaattacatgctaatttttaataattgtattctcagaggaagacttatgttttatgttttggtgattctgttcctgaatataggtcaaaattaatatgcaaaattaatatgcaaactccttaatcactttggcatagattcctaatagcaaaacagtacttggctgaagatgggaattatcctggtttattagtctgttctcacactgctataaagacatacctgagactgggtaatttataaagaaaagaggtttaattgattcatagttccacatggctggggaggcctcaggaaacttaaaatcatggcggaagggaaagcaggcatgtcttatatggcaacagacgaaagagagcatgcaagagcagggaaaactgctttacaaaaccatcagatttcatgagaactgattcactatcatgagaacagcatgggagaaaccatccctctgatccaatcacctcccacctggtctctccctccacatgtggggattatggggataaccattcaagatgagatttgggtgggaacacagagccaaaccatatcacctaggttctttttttcaattattattatactttaagttctagggtacatgtgaacaacgtgcaggtttgttacatatgtatacatgtgccatgttggtgtgctgcacccattaactcgtcatttacattaggtatatctcctaatgctatccctcccgcctccccccactccacaacaggccccggtgtgtgatgttccccttcctgtgtccaagtgttctcattgttcaattcccacctatgaatgagaacatgcagtgtttggttttctgtccttacgctagtttgctgagaatgatggtttccagcttcatccatgtccctacaaaggacatgaactcatcagtttttatggctgcatagtattccatggtgtatatgtgccacattttcttaacccagtctatcattgatggacatttgggttggttccaagtctttgctattgtgaatagtgctgcagtaaacatacatgtgcatgtgtctttatagcagcatgatttataatcctttgggtatatacccagtaatgggatggctgggtcaaatggtatttctagttctagatccttgaggaatcgccacactgtcttccacaatggttgaactagtttacagtcccaccaacagtgtaaaagtgttcctatttctccacatcctctccagcacctgtttcctgactttttaatgattgccattctaactggtgtgagatggtatctcatggtgagaaagtttttgcaatctactcatctgacaaagggctaatatgcagaatctacaaataaacaaatttacaagaaaaaaacaacctcatgaaaaagtgggcaaaggatatgaacagacacttctcaaaagaagacatattgcctaggttctaagtaagaatgcaggccacttcatgtctgtgtcatgagagctttgcacagacctcactgcctactggtactcaccagcctgtcctgtgatgcctctctggagtgctcagttgtctccggttctttagtgcaggggtccccaacctttttggcaccaggtactggtttcatggaagacaatttttttccacagatggggcaggcaggagagaatggttttgggataaaactgttccacctcagatcatcaggcattagttagattcataaggaatgtacaacctagatccctcacatgcacaattcacagtagggttcattttctgtgagaatctcatgccactgctgaactgaagggaggcagagctcaggctgtaaggtaatgctgtgtggcccagtttctaacaggccatgggctggtaccagtctgcggccctggaggttggagacctctacttcagtgcagcatcccctccccacctgcctcttcccctgaactgctgccatgtggagtcctcagtcaaggaagcgcacggtatttgcagaggttataaattagtatcctgtggttggaatctgacccatagatctcttttgtttttgccaatatgttgtttttaaaagtttgatttaattgtccaaacttaaaaaatttaaaaatccggagatgcacacaaaactctgagtatcctctttctttccttctttctctctctctcttttcttttcttttctttctttcacagggtctcactgtgttgcaatcatggctcactgcagccttgaccacctgagctcaagctatcctcccatctcaacctcctgagtagctgagactacaggtgcgtgccaccatgcctggttaatttttgtatttttagcagagatggaatttcaccctgttgcccaggctggtcttgaactcttgggctcaagcgatctgcctgctttggtctctcaaagtgctgagattcaggcatgagattactgtaatcgctctggcctgagtctccagtttcattgcaaaaaaaaaaaaaaaaaaaaaaagtggatgatctggctatgcagggcttatattcccacagcacaataagttattggagtggggcctaccaaaaaaaaaaaaaaaaaaaaaaaagtggatgatctggctatgcagggcttatattcccacagcacaataagttattggagtggggcctacatagggcacatttcttccaattatcctctttcttcgcccttccctttcactcatttatgttactgcttggtaacatatttggtggtgacgcttagtttgttgcaaatgcaggataagacacaacagaaaaaacaagcataaggaaagtagtggctccctgtgaactcttgctccctgctcttgtccttgctgtctgcagggaattccttccttggaacctgctttcaggctctttttcttttggaccctatttctgttggtatgtcaactctgattttatcccttgtgctttcaagaggtgtgggctggagcgttgttcaggaaagcatatgaactttgaaatctggtttgtatctgcaagacctcgttttgaatcccagccccatttcttactgccttcagttcccttatcagtaaaatgagggcaatcaccggtctcataggttggtatgagtattaaatgggattttttaatgtaaagcatcacacagagggtagatcctcaaataatagtgctcttgtccctctcttctctcttttttttcctttaaattttttttttgtttcttctttttctattggtccattgggagaagaaacctctcttctttcaagacatgattctttccctttttttgtgactttgatgaaaccacttactcctctttactctttttgtagagcctactgttttttcttccttgtaactttgtctttcccatctgtacatttcacatattcccttttcttggagttagaactctctcataaagactctcttataagaataatggatgacaagtacatttattttgcttcgggaaattctataagaaggcctacgttttatcaaatttctataacaattgtatatagttttgtgatagaaactacattagccttcacagtaatctgttgggatgctttctgtgtatatgtatgtttccctgttcattgtattgtagaaatagagctgaggtcaaaggctggaaagtcatcaggagaaaaaattggttgtggaagggcaacacttcgcctgagatcaaaaggtcctgccaccgtggaagaaatggtatgttatgttcatttacttcctgttctgcttggaaatgttgagttagataaaattccattcattctaaccaaaacttggacttttaattcactgtctatttaaacaatctggaaattactgaaggtatttaaaaaggaaatatagaaattaaggacatgagaagagattgtgatctatagaaattctcagttacctgtaggtgacgtttctagactctatagacagctggactctctcaaaaacttaagtcaaccaaagctctctgagaaccaagaaaatgtttcagagccacctgtaggagtaaacaaaagaagatattgataatgaaagattatattcgtaaactcctcttctcacataaaacacctgtagtcatctttgactcttttcgttcatgtcccatgtcgcttccatcagcagatcctagtggatctacctctataagatactggagtccaatgacttcttaccacccctgcccaccactgtgccccaaggcaccatcatcttatcctggattttgcaatcaccttctgtttagtccacctgtgttcacccttgccttctttccacctgtgctcagcacaaccctcagaatgatccttaaaatatgcaagagaaattatgtcacttttctgttcacaaccctccagtggcttcccatgacactcagaataaaacctaaagtcctcagaatgaccaacatgaccgaactccgtatttcttctctgttctcatttcccatccctttgccgtggcttcctctgcttcagtcatgctgatctccttgctgttcccaaacactccaggtgtatccccatctcaggctctcagtactgctgttgtctctgcctgaatgttttgcccatttatctgcatagcttgctcccttgccatcattaggtttctgcccacacattatctatctcaaaggcctttcccgagcatcctgtataaacagcaactccctccacccctcccactgcccactcttccatgtccttaatttttgtcaaagcaattgtattagtctgttttcacactgctaataaagacatacttgagactgggtaatttataaagaaaaagaggtttaacggactcacagttccacatgtctggggaggcctcacaatcatggtggaaggtgaatgaggagcaaaggcacgtcttacatggcagtaggcaagaaagcatgtacaggggaactgctctttataaaaccgtcagatcttgtgagacttattcactatcatgagaacaacggcatgggaaaaacctgccgccatgattcagttacctcccaccgggtccctcccacaacatgtggggattatgggagctacaattcaagatgagatttgggtggggacacagccaaaccatatcagcactaaacacactaggactctatatctttgattaattttgtctactgtctagctcctttgctcacatgtcttgttcactgctgcatccccagcacctagaataggacctgatataccaaaggaatggaaatctttggtgcattaatgaattagtaaacgattccttttagtttgagaaaagcaaggatttttccctttgaatgactttgtctatatataggtcagtgtttgagtgaaaaacaccagaaggagaagtgacaactagaggcaagaagggtggaggaagaaaactgcaagtttggggtggcgatggtaaggattccaagtggcaagcagcaggcccacaacagcagcaaaggcatgggggtcaaagccctcccgtgggcagatgggatgtcgagcaggtgactgatgcctgtgagctcgggggggcaggggcaaggctctgggcccttctagggtctctctgtatgtgaatgctgtctgggttcctatgtgtttgaagggaaaaacagacagatgaacagttttgaggctgtttcacagagtgggatctcagaacttgttgggtgacaaggtccagggttggtcatgggggtggtttgttgaagtagacacttaaggaacacatgaggccaaggctgtccttaggaatgtcgaggcacccacggtgttgtcagttttggggggatctagaggaagatcctgagtcaaatgcgtgggttctgggagaatgaaaggaccgatcagaggcaaatggcaacgaagagatctgatagagcaaaaagtgttttgaaaaggagatatgatgaggtatgtgaaggaaacccagggcagtgacttctgggcatttggagcctttattttccctctgtggcccagcacactgcctggtatattgctgaaggccagtaagtgtttattgaatgaataagcaaatctcagtggaagaaaggaatttatcagagaagggaagaacagagggaagttgctggctgtgaggagccaggagaatgtcagctctgccttttgctggaggctgtgaggaaaaatgagcagacctttaaacagctcacaaaggaagcaggtcagcaggaaaaatgccacgtcccttcaggaggaggagcatcttctaagggttaaatcattcgtcactctttgttaagcacctgctgtggcaaaggtgcctgaatggaaaaggagcagcttaagatctacctggggaggtaggaaagattcattcaaagataaacatctaaaaatctattcctattttcatagtctgtttagtaaaatagggcaattaaaaatagctcataatgaaaggaaaaagctgtttggtgctaatattaaatttgatacaaatgacataaaatctaatttcaaacactttaagaatttaaaggacttatgggatttaaaacaaatcactcctttaatcacctagcacaaattctgaaaatggtgtaagattctctgtattagtccgttttcacactgctgtaaagaatacctgagactgggtaatttataaagtaaagaggtttaattgactcacatttccgcatggctgggagacctcaagaaacttacagtcatggcagaaggtgaaggggaagcaaggcacgtcttacatggtggcaggagagagtgagtgtgcaggagaaactgtcgcttttgaaaccatgagatcttgtgagaactccctcactatcacgagaacagcctgggggaaaccacctcatgatgcaatcacctcccaccaggtccctcccttgacacgtggggattgcaattcaagatgggatttgggtgggcacacagagccaaaccatatcaattctccacttgcataacctcatactttattcaatatgtgcttgctgagacaggcacagtctaagtgctggtgatacaaagaagaataaaaaccctgtttctcttctaaaaggagagaagcatgaaaagaagctattacaacccagtgggatagggttaatggaagcaggtgcaggatacacagtgtcacaaagaaggggctgatcagccattgacagggattggggaaagaaaggaggtcagaaggctgggtgcagtagctcacgcctgtaatcccagaactttggaagactgatgtgggtgggttacctgaggtcaggagttcgagactagcctggccaatgtgatgaaaccccatctctactaaaaacataaaaattagctgggcatggtgctgggcacctgtaatcccagctacttgggaggctgaggcaggagaatcacttgagcccaggaggcggaggttgcagcgagccgagattatgccattgcactccagcctgggtgacagagtgagactccatctcaaaaaaaaaaaaaaaaaaagggtcaggaagtgtttctctccggaagaaattagtgagtgagttcaaaatggggaagaagagtgttctaggcatggaacaataatgggttttggggacctgtaagctgttcatgagattggagtgtggggtgctggaagtactggttaggtaggggtgatgaggctagaggcataggctggggttaggatatgaagggccttgtggataatgagggagccatttaagaattatgaggggagtaacacaatcagttttgtgttttagaaaaatcccttggttccagggtatgggttgttgagcagcttggatttgagagggtgaagaccaaaggcagggagacaaaataggaaacctctgcaaatcagaaaagatgaggactaaacactggcaaacagaatgtggatggagaagaggtgatagatccagatctgttccgtagcaaataggaaatattagaatggtaaaatattggtggccatttgggtatgaggagtactgacacttgtcaccgtaacttaaaacgtgcctggatagatataaaggttaatacctgttaatttgcatagcctgttgctttatacagacaattcaagatacattgtaatgaaggcaagagcaatatattgtctgttattgtttttaaggtttagttcttgtaaataaaaatgtgagaaagttgtattaatatcttcaaggaaatagatttttatttgctataaaatgcatgattttaataaaatttgagactacaaaacaacatatatttataacagtattgaaagtaacatgaaattcttataatctaaataatgaattctacatttgcatgtatagttgagtagttaacatctttgggcaattccattttcagctatgatgccatttaaagccaagtattgaaataaactgagcagaatttaccaaatattaaaccaaaaatttaaaataatatttttactgaaatgtttagtaatcatttcgggaagaacaaaaatgttttggtaccattaatacataacacaaaaatgatttaaaaagtattattttatcatctcattcttataaaatttccttttttggtgtatttttataatctatacaatatattaatatggtaatacatgtgtaattgataagcaatacatacaataaagttaaaaatacacaataagggtatttgttcagaaaagttttactattgggatgagccatcaaacgtttggagaccctggcctgcaccataaagaccaaagtccttttcatggtacacaggactcctcaagatctagtcatatttgtcactgtgttctccagctacatgggacttctggcatccctctaacatgactctgtgaccttacttagactttgcctatctattgcatcctacttgaagtgtcctctcctgcttatctcctcttcatcattgaaaacacagttcttggctgggcgtgatggctcatgcctgtaattccagcactttaggaggctgaggtgggcggatcacttgagtccaggaattggagaccagcctggccaacatggtgaaaccccgtctctactaaaaaaatacaaaaaattagctgggcatggtggcgcacgcctgtaatcccagctacttgggaggcagaggttgcagtgagctgagatcacaccactgcacttcagcctgggcaacagaatgagactctgtctcaaacaaaacaaaacaaaacaaagcaagacaaaaaaaccccgccacagttcttaagacatccttctttttctctgagacagggtcttgtcctgttgccgggttggagggcagtggcagaattatggctcactacagcctcgtcatcctgggctcaagtgatcttcccactttagcctcctgagtggctgggactaaaggtgcataccaccacacctggttacttttaaattaaattaattaattagtagagatagaatcttgccatgttgcccaggcttgtctagacctctcaggttcaagtgatcctcctgtttcagcctcccaagtgtctgggattacaagcatgtgctaccacacccagctaattattttaattaattaattaattttttttgtagagatggagtctcaccatgttgcctgggctggtcttgaactcctaggctgaagcaactctcccaccgtggccttccaaagtgctgggattacaggtgtgagccactgtgctcagccaagtcaccttctttctaaagtcttccatgactgttagagatataaatttgcttcctcccctgtgatgcttctgtgccttttatatcctttaaaaactgttacatgttatttattttcacatctgtttcctcttctagattgttagctacttggggattgtgttcctggcttttcttttttgaatccgtaacacttagtgctgacactagaaataagtatttactgtattgatttgtatttagttacagagcacattctagatctatttccattaaaattagctgaaatacacaattatgaaccggctccacatcaggctttctcttgtgtatgccctgacaatcaagagattttgttgtataatatcttatttctctcttttttgataaagccttctgaaaccaaagcaaaggcaattgaaaagattgatgatgttcttgagttgtacatgggaattcgagatattgatttaggtaagattatactatttaaaaaagtcttatatctcttaatctgcttaatgtttatgtcttgtttatacatacagccaattatacttttgaagataacaatatttgtggtatgatgaaaagaataacagacataaagataagaataatgaagacctgttccttaccgctttctagctatgaggtcttagtgccaagtaaactttaaaacattttagttagttcttagtcattaaactgtgactactatctcctttagtgttgtttgtttggatttaaaaaatatacataaaatgaattttgtagatgatacatataaaaggcattattatttgatatatcagaagtgcattgattgaattgcaccctttaacagggttactgaagccctatgaacaaggaattagaaatatgaagaaaggggacacacttggcatatgactgagaagggcagttgagcagttgaatttctgcgtatttcttatgtcatcattaggctgtcagggtcttgtttatcagttaagactctaccagttgcaaatgactaaaacaaaaaccaaacaaaaaaccctaattccagctggcttaaggaaaaaaaaaaaggagaaacttattggttcttataattgaaaagtctagcgctagaccttggcttcaagaatggctggatcccaagttctcatgctgtcatcaggatatgatttctcttctctcagtcttggcttcatttcaggcccctgtggtatcccctggcagcttcagtctctccctcatggggccaaaatgactgctattgctccaccctctgcatcctcgtggcatcaagcacaatgagaaagagggaggacctcttccaaatcattcaaacaaaatgcccaatattgtcgctggttggtctgattggctcaagtgagccagtcactgaggccaagaggatggtaggtctgggttgaacgctctggaactgacagtgaccctgaaatacaagggtcaagagtgtgaaaaaggcctgacccttcccatgcagaagcaagataaatgttccactaagtagggcagttgcatgctgggtagagaaaagagagtaaatgtacactccagtgtgggggtttatgtctgcatgcatccacaggtatgcatttgaatcaggtactttctacattttttaaaggtaagaacttgactattttgtttatctgctaccaggtagagtatttgaagctcatttatccttttctacttccactcatattccattttccttatagaattaccaaaagacaaaacaaatttaccttaaaaatctcaactggcttttatttgcaactctagtatcaggcaacacctcaaaatgagtgctctgatgagctgagcagaggaggttgactttagagtcagaaaatggctgaagaaatcagaaacataacaaaaagtgggttcctgttgcaaggttactttcttcgtaaaggtgaaaacagagggaatttccttatcatgccagctaaaactggcccatttggggatttggctattacctgtctttctcctgattttgtggaaggtcagataaacaacttagtttggcttagtgagtggaacttcagcatgagtaactccattttggtttggtctgttaggcctagtataggagctcagtccaaaccaatcacctcctataaattttatttaacaatctattcttattttctttcttgcctgtgtgaacttttatttatcttctaatttttgagacaggatctcactctgtcacccaggctggagtgcagtggcacaatcatagctcactgcagccttgatgtcctggtcccaagcacttcccctacctcagcctcccacgtagctaggaccacaggtgtgtgcctccatacccagctatttattttattttactttaacaaattttttttggtagagatggggtcttgctatgttgctcaggctcaagtgatccccctgtctcgtctgtcaaagtgcagggagagattacaggtgtgagccatcattgccagccctgagaacttttaaaataaaatttctgtactggatatagagatgctgtctgcaacttaaaaacattggtagtttgttccttgctccttggagaaaaatacaaaattttcgtgtggatgcttttatcctctgtgcagacaagaagttaaagctgaaaaccaatgtctgagaacttctctttccaatccttttgcctggctaatttttttaattttaatttttgtagagctggggtctacttgtgttacctaagctggtcctgaactcctgggctcaagccatcctcttgccttggcctcccaaagtgttggaattactggcattgagccgctaagcccagcctcagtctcctgttttgaaattgcagatctcaaggaacaatagaatccatgctgtggtctggagtgaatcacagacacagggcctaggaaaagatctaactaggaataaagacagacatacacataaacatgaatacttttagacatataaggaaatatgtaacatataaatagaggcatcaacgtgtacataaatcaaatttagaatagaaatgtttattcgtacaacagtctagactgtgggccattctttagtggtatttttccatacaggagggaagcaaatgtatatatgtgtacatgaatttttacatatacatacacacatacgcatagatgtatttatgctcacatacagtgaaagagatatgatatagtattgcttacaggcatacatatttggcttgaggccctaaccctaaccctaaccctaaccctaaccctaaaagagaccagcctgggcaacatagtgagatgagaccctgtctctactaaaaaaacaaaaacaaaacaaaacaaaaaaattagccaggcatggtggcatgcacctgaagtcctagccacttgagagtctgaggcaggaggatcgcttgagtccaagagtttgaagctgcagtgagctaggatggcgccactgcactttagactggacaatagagtgagaccctgtctctaaaaataaataaataaataaataaatgaaaaaaaaaagaagaaaatgcagcttaaaaaaaggaaattcagggcactaaacattccttacaaattctttgtaaattaaccagaaatttatttgtaaggtgaattagttatctgtaacaaattcctctaattgacatgaaaagccattatcattacacatgattagcaatgtaatcagttacctagagaggtaaagtgtaaggaaagtaattatttgaagaatgtaagccattgttaaattaggaatttctttcattattcagatctgattagcatgaaatataaatcacaagtgtgatactgatttaacagacaaatatatttacttgtataaatattctcagtatttcttagctttcagaaatgttaattcttaatgcaaattacactgacatcacatttttctgtatttgttaacgtaagtatatatcttaaaaatttaaaaagtaatatggcaacaacgtgacttaaaacactatcctcaaaaaaagattaagaggtgtttattatttgaaaatggaaaataatttaaatgaatttttgtagagagtaatcctgaagatgaaagtgcttcatttgattgtaaagttaagttgtgaacgatgacttttctaccagccagtgtcaacatgggtcaccttgggatgttatccatgaaaaaaattaagcgttctaaaagatgctgagtcctataagacctcacatggtcttgacctaactcagtggaaagttgtgtcatacaagtttcttcttgaatgtttaaagaaactgtgtaagttgtgtatagaactataatgttttctgatgataccaatttaggagatcatccaagcaacttcagaattttagggtttcaaatttattgagatcctgagatgtgtggaaagaagatttgaatgattgtttcaaagtcatttattctataaaatcttttcttttttttttctttttaaaaattttactactttgcttttggagcagatatgaagtctgttatagctcttgaaaaagtatgcagtaatggtgttttaatagtgagaattacatttcttcctttcttcctaggatcactttttttttttttttttcagacagagtcttgctctgtcacccaggctggagtgcagtggcacaatctcgctcactgcaacccccgcctcccgggttcaagcgattctcctgcctcagcctcctgagcagctgggattataggcgcccaccaccatggccagctaattttttgtatttttagtagagatggggtttcaccatgttgaccaggctggtcccgaactcctgaccttgtgatccacctgccttggcctcccaaagtgctaggattacaggcatgagctaccatgccgggccagatcactttctttttatagtgaattcaaaacaatgaacactatagaaagtcatccttttcagataaagccaatgaagttttagaaattttcattaaaaatcattctacattgactgcatttttgatgtttgacttgtgaattgtttgaaaagcattgatatttataaaaagtcttaggaaaagtaaggcctgaagaccttccatagaatgagacgtagttgcatattttatgattaaactagcaataatgatgactaatcttcaaaccctgctatttgccattttatagatttgaaaactgacattcagagaagtttgataacttgcccaaagttacctaagaagttaaaaactaagatttaattctgaaactttgataccaagatttttaaccgtaaagatttttaaccgtaaatatcttatatttaaaagttctgtttaagtgtttaaaaagttaatggaaattatatgttgatctgtatcaccaaaacaagtttgtcattaataataatgtaaatgtagtccagtggcagtaataaaaatggccactagaggtcagcacttagctgctatatgtggtaaaaaaaaattctctttacagttaagaaaattctttttgagatggggtctcactatgttgcccaggctgatctcaaaatcctggactcaagcagtctccctacatcaccctcccaagtagcagggattacaggttaaacatttactattttttaaatctatttttttctttttttctcatgtgtttctaaacattatactgtaagaaaattctacttttttttcttttttctttttctttttgagacagagtcttgctctgtcgcccaggctggagtgcagtgtggcgcgatctcggctcactgcaagctccgcctcctgggttcacgccgttctcctgcctcagcctcccgagtagctgggaccacaggcgcttgccaccacgaccagctaattttttgtatttttagtagagatggggtttcaccgtgttagccaggatggtctcgatctcctgatctcgtgatccacccgcctcggcctcccaaagaaaattctactcttctaatggaatattttttgccagattgcattcaggtttattattgcagtatattgtaattttattataatcaacagatgaaaataatcttagtggctatcttatgttaatatgctgtacctttataaaaagtgttttattttgctaaattttcttttgcttttctcttaaatcagagctataatattttatcaaaaaggatgaattttaccatttacttatcctgtaaagatgtcttaaaagctatgttcaccaaacccagctgaggatgagaaataaaataaaaaagcgatgtttatactttatgtattaggaaaaatatataacatatttagctgcatgctgcatttttgaattcatatagcaaattactggtttttaaaagatgtatagagcactgtattacatgcagtatttccagcacaattatgtagctgtgtaattggcatttttttgttgtttctacaagatcaggtattttttgaaggcagataccatatcttgctcagttttaatcccagctcttaccacagtacctctccaagagtaagtacttgataaatgtctgttgagagtcacaaaagtagtgaattcacagggagcatgagtcctaattttattagtttggagctttggcccttgggcaaattattaaacttagaatcctaattttcacatctataaaagggacataataaaaataatcttatagggttgccaaggaatcaaataatctgtataaagtcctgtcacatcataaataataatgggtgtaggtattatcattcttagtgatgatcactaatgatgattactattagtagttgtaatggcagtggtaatagagggagaacatgtggagctgtataactagactgtatcagcagctctgggcagtactgagtgtgggggtttttcttcacttttctgctgtgccagaatgagtgcatgagcgagattatgcattttggactgtgaggttagactatgggcatcttgaagcagcattttctttcatttttgtgactagaaacccaaagcagacattgcaagtcagtgcaggtgaaatctacaacatggagttcccgggcttagtgcactagacaatgctgctgagcttcctgaggtataaaaaaaaaatcatgtaccaagttgtttctttttccctcttatagccaaggatgtgtgtgtgtgtgtgtgtgtgtgtgtgtgtgtagagagagaaattgattcagtgtccatcagtgaacatctgcatccttgtcattgtctcccccagcatttaagagtgtcatctatactgttagtttctgtttctgaatggtccgtacattttcttatgtcttttatctgtatgcatcttatttcttcctcagctagctttcttaacatgtgttacccatatgtcattataatctttaggtagttgtcttaataaatgctacctgtaaagcctatgagaaagagttaaaatggtagagtaagcaaaattctgaactggagttctacttcagcagtacttcaccttaacattctggctactcttcttttacatcctggctatgagaccagagttctggacttcactttccccagtgcatgctaactgtgcctgtgcaaaaagtatgtaagtgtaattacacaccctcctcttgcaccacccattcactagcatttattatgcatgagacactgaattagttactacgggcataaaagactgagtaagctactcaagatctgttgggagtttattcttttagtaggagagaaaaaaatacacagaaaaataaatgtcagtgcagagcaatgttgaatttgcagtctaagacctttttattgaaagtgtttcctgaggaccagcatcacctgggagttgaaaatgcagaatctcagggctgcagaactactgaaccaaaatctccattttgccaagatcctaggtgatttgtttgtgcatttaagcatgaaaaacactggcagaagggtttagagaatggggatatctcttccagctgtggacaaaggatttcatggaggagagagccttgaaggagagaaggattttgatggtggtgctggtggctaggaggaggttatcctgggcaaaggcagaaagcagcgaagatagcattttgagtggtcagatttatgagggtacagcattaatgtagtgtagtgtagtgagaaccaagggttctgtagattagactgccactagggtttagttttaaagataaacattggttacacaaggaaaaaaaaattgtgtgtgtgtgtgtgtgtgtgtgtgtgtgtgtgtgtgtatgtatgtattatggattcatggcttcctgttctattcactggagttataatatattaccatcattacttatttggatatttaaattatccctgatttggtcagtgtgaactcttgcactctgacatctatatccttttcacatgttcccatcattttgtgacactttcttactttctggtacaagatagtcttggttcatattgcactttgcctgctctagccctggaatctgccatttttctgaggaagtcttagtctttctaatggagaatggtatttaagaaccaagatttcggtgctttgtgtactcattgtagttgggatgtcatgcttccaggactgaggaatgtgtatacacatgcatgtatgcatttatgtctgtatttttataacacctcaattggagatatatatatatttccagtgatatctacaattctaattccatagggttcattcttattttctccctttccctatttatccttttctggcagtgacaaacttgattcctgttgttctgtatgtatgtgtctgtgtatgtgtgtatgtatgtgtgtgtgtgtgtgtgtatgtatgtgtgtgtgtatgtatgtgatccatctccatatgtgtaactaatctcttatcaccgtggctgctgccctccctccccattcccatgccatcctcaccacatctgtactctcccaccccatgccaggctgcctggccatatagaagccctccttaccttactagaggtttgatccctctactagttcactgcacccccaccctacttctgctctgatcctggtgctcttctgtaggccacatctctcccttttcttcctagcctgccttgtgttaggactgaactgatgggaagaggcatagcttttatctctctagaccttgtggctcgttcagagaagtcatacaaacttggattagttcatccttaacctggaaggaaaggagatgctggagcttttccctggggctttggcgtttccctttcacatggaggtttttcacccaagtcccacatcacatatacaccatctctttctggttgctggtgcttctagggtgctgagtggaaatccactgagcctcttgggctcccagacagctggggcaagtcctaagtactcctgaagatgctggttccaagacatagaatatggaacccaggcaacttagtagaaaaactgaacaaggccgccactttcatgttctatcccaaactggagaggggctcagaaaaggtaccttgattccacaggtagacagatgtcttcctctgcttctccccagcttgactgctccagtgcaagctgtcatcctttgtctttttgtctttgggcagggaggactggactccatctcagttggcagtgggggactggtggaggagggagggagagtagtgactattaggaggttggggaaggggtgttctttaagtttcctgctagggttagtcacagccacagggtttctttcaggggatcttgttctacccatgggaatgccagaggttcccaactgatgggctccaaggttgggtagggggcaagggtggcagctgcaaacctgggttcagtggacacattgttgaaaagtatctttgccaccttgatgtgtgtgtgtgagagagggtatcttactgttttaatttgcatttaattttgcatttaatttgaaatatatttatgcatgttacttttagcaagtaattttcctgttgccatttttctcagtcctttgatgctatttcatttattgttaattttttaatattatttttgatagccaccacaatgtttgaagctggaaaggacaaagtaaatccagatgaatttgctgtggcacttgacgaaactcttggagactttgcgttcccagacgaatttgtctttgatgtttggggagtcattggtgatgccaaacgaagaggattatgatgtgtacactccatctctgaagaaacaacccatcgttcttttttttctcttttttaaaaagtcctataagatctgtttttggacacctttactaactctggtttaatttcatgtgtatggaatatattctttgaaatataattttggtaattttgatttctgggcactttttaacattgctgatgtagtatgcttaagagaaatgacctaaataaggatcaattgtaatattcattcaaaaggtttttaaaagtaagttttaaggagtatttctcgacagatgattttcttctccattaatacccatgctttgtttttcacatataaatagatgatttcaatagctttgtagttttttttcaaaatcttaatgtaaactaggattggagtatgatttacctcatagtatcttcactgtgttatcctagtttgaacaggatatgttcaggaaatgaaaggtgaattatgccccttattggtctagaagcattggtttttttttgatcctctgagtaagggaaggaagattcctgtggcatgttgatttctatggccaactttctctctttgtaaaacaaagattgattgattttcttgtatgcttctttatacatgctcttaaaacttgtggttgaaatctgtgctgtgtgtgtgtgtctctgcatgtgtaaaagaagggtaaaaaagagatgggtagggtagaactacttgcatttgatttttttttcagtccttaaaacattatttctttttttcactcatagccacttttatgttaccttttataagcactccagggaagattttatatttttttgtagagtttttggaaagatatttactcaaaataactatgctttagaactttttttttttttttttttttggttaaacagcagcactttttagttccctaaactttagaagaaatgctatcagaaatagatttccttccagtggaaagaaaggaggaagggagaattgagaaaatatattagtctattattttagagttctaatacactctaaattaaagagaaaattgagagtaaatgactgtcttatcactcttatttgacatttcgtaggtgtaagagaaatggaaatgaatggtttcaacaaagatcatttaatacagcagagcatggcatgaccaagcatctttgtaaagtgttagatggaaaatgctgtgtgctgccatggtaatcagaaataataacctgttagggatgtattctaggaaatcagaagtagttctcttttcttgctggattattgcttagataactcttgttttctggtaaaactttagttgtattgccatccactcctttttcaaatgagtttaatgccataaagctgatattctttgtccgattaatttgaaatctgcacagaagctgttttagtcattaatgtgtaacaaaagtagcttatagaatatggactgccttattgctgttgcttatcatttgaaaataaaatccagctcaggttgtaacttgttggtactcgtttagtgagttcgttttggaggttctgaaatacctattaattcttaatattacctctcttggaaagacacaaaaaaagagctgttatttttaggcataagatgacttaggaggcccatagaaacattctcgtttaaacaacaacaacaaaataaatttatcagcactagatattagatttgaaataagtcattgttcattattgatggttgtcagtttctccttcctttttgggcatgcataaagacacacttggtgctgattccatgtgatttatggaatgtcattttcacaatgatctttctagaatttgtgtgtaaggttgtgatatccatgtacagctgtaactatatatacttgtctgttagcattcagtggaccattatcattactatcatcacattacctgggcttcaactgggcccaagtactctatatactgcctgtaataggtttttccttgaaatatccttatctttcacctctacagctaaactgataacaaggtcagtttctttatgtcattttattcccatacctaaaattgcatctatttgtgagctttctgcctttttgtaacgctcagtgcaccaaaagcgtctgtttttagtgcagtcacataatatataagtgtgggatacccttctgcagcttcagtgagacaaatcactttttaaaaaacattccattttattggcatcactagatgtttttaggaccctgtccttttcacttttctgtaggctttttttttttaaatggaagatgattattttgtttgttcttgatttcctgttattgaaaacagcatcttccttcttgcaatggccactaatagcacacaatgcgttttctttgattgtagcagaaaatgcaaatgataattgtatgttgggctcgatgaggccttgaacatagctgagtcctaatcagatgtatatactctgatgattacaaataggtacatgttgggtttctgtgatgtttcaaaaatacaattatataattatgatgtaaactctttaagaattcaattataaaagcaataatcaggtaacctctatttggagctgctacatccaatattgtgactgaaaattaactaaagagagataatttttcaaatgatgtataatttgcaatattttcccttgcaactttagcaaatacacatattccaagtaaaacttta

SEQ ID NO: 720 - DNA, 15854 bp, Homo sapiens
agggcggggcgggcagcaggtgagacgccaggtctccagggctccaatcactccggagactgagccatggggggaaagcagcgggacgaggatgacgaggcctacggtgagactggggcgaggcccgggaccctgtggagggaggggaggacgggtactttgggaatggtgtctggggctggctccagggagaggaactaaggagagtactgtgtccctgaggggagggcccgggaaccgggagccatggagggagggagtcagggtcctgggaggaggatggggcccgggggctggggctgttgctggggagcccatggggagtgaagctgggtgcctctgaagagttggggctgaggtccttgggaggaggggggtatttcaggcctggactctgggtccctaagggcagggccctaggaaacaaagccgagatggaaggtggcaggttggggccctgagcagaatagggctggatgctgggagtgtcctgtgctgcagagcctgcaaccagtgaggccagggtccctgtaaggaggaggaggttcagcctggagtctgggtctctgagggcgaaagctgcttgtggcctgccggctcccttgaggagtgaggggaccctgagtgggctggcctctgcctgccagggtctctgggagaagtggcagagggagtgggttctgctgggggtccctgtgaggagttggggctgagggtctttgtggaaagggggctggggtcctgcctaggggtctctgtgaggagctaggagcaggagctggtcttggggtactctgaggaatagggacagggcccctggggttcctgtgaagggtgaggcctgaggggagaaacagcagggagcctgtttccagaatctgcaaggaaaaggggctggggttctgaggagagagggagctggggactggcctccagatccccacgagcagtgaaggctggggactcacctgcggaggcccccctggtcttctggtctgaaggggaaggaacccctatgagggaccttctcgaggagaggcttgagtcccttagggccataggggagcaggcagtgaggactcccgagtagacttcctggagcggcttcaggtcaatcattgtccatgagccatggagggacagagtccagcgcacctggggaaagtggaccccacccgctccttcccagactcctgcccagccctcggctctccctcctcagtgcccacaaggaaccctgactgcccagccctcctcctccctgtgtgtgtactcagggaggaccaggaactcaacgtgcctgcaatctctatggctgggctcaggtgtcactctgactgctggcccagagcccggagcacactgtggccaggggactgaggtcccaccagagtgaggatgtacagggccgcttccctccccaggccctgctggggttgacacctttgtctccagtttctttccccatagccttgaaccagagggtaaggtagggcctggggcagataggggaagaggccatgacctccctgaggggctgtgggtctgtgtggtccctggggagggattagggaggaggcagggatgagaatgagggagtgagagccactgggagtcccacatcccagctaaagggagactcaggagaaccgtgccagggtagggcaggggaccaaggccatttcccagactgactgccttgagatgtgagccggaaactataaaggccttccttcccctccccatggcagcctgggtggagctcccagggagctgctgagctgctgaccaggcctggatcctacctttcctgctccccagttttcccctcctgccagtcctgccctagcccatctccctccaaacacctgaggcctgggtaggatcctggggctaggaggactcagcaggacaagatatgcagagagagactcatcctccacacctcttctcatgtccctcagggaagccagtcaaatacgacccctcctttcgaggccccatcaagaacaggtgagctctgggcactgctccgggggctggcgggggtggtgggtgcagtgtggaatccagtatttgctttgtatttgctaaaatattagtaggaaacttgtgaaaaagagaaactcctgccccagatgggtggtgccctggggggattgttgtgtctggagcaggcatcgagggcttcccagttctggggggatgttctgtttcttgacttaagtgccggcttcacaagcgagagaactcacccagctgagcccttgcgagttgtgtgcttttctgtcttttacttcagaagaaagtttacccacccagaaaaaggttttctttctttttgtgttttggagatgggggttcactgcaggctcgaactcctgtgctcaagtgatcctcctgccctagccttccgagtagctgggactacaggcatgcaccatcacaccaggctaatttctttgagatgggatctcactatgttgcccaggctggtctcaaactcctggcctcaagggattgccctgcctcagcctcccaagtagctagtattacagtcgtgagccactgtgcctggctaggttttctaaataaaatatttaaaaaaaattagccgggcagtagtggcacgcgcctgtaatcccagctactcgggaggctaaggcaggagaattgcttgaacccaggaggcagaggctgcagtgagccaagattgcaccactgcactccagtctgtgtgacagagtgagaccctgtctcaaaataaaaaagtaaaagcaataaaaaaataaaaataaagcctactgatgcccatgctgcagcatcacccaactctctaacccttaacccctccagaccataagccctacctccccaagtctccttagctcagcctcccatttcgtttctctctcagaagctgcacagatgtcatctgctgcgtcctcttcctgctcttcattctaggttacatcgtggtggggattgtgggtgagtttccagctgctcagagccagggcagtgggtgagggacaggaacccagggagggaccattcccataactgccccactaagtccctgccctccaatgactcatctgtgcctctgtctgcagcctggttgtatggagacccccggcaagtcctctaccccaggaactctactggggcctactgtggcatgggggagaacaagtgagtacaaaggcgagaagaggagtgcaggagcgaggcgaggtagggtgggcaggagacacccccccaactcaggctccagacctgtccgtgctcttccacagcctttccctgctgtccccaccccacctcagcctccctgaatctgacaactccaggccacgttaagaaccattgctggacagttagcttcttgagtccccccagaaatgggaggcagtggagagtcgtgttaagtgtatgagttttacagttcagagattggtgtttggatccccaactggaccaagttttggttgtgtggccttggacaagttactcaagctctctgagctttgatttccttatttgaaattcaaggggaattccagaagcaatgccaacagtcctcacatacagatgtccaataaataataaaacctcaaatatttatatagcatttactatgttccaggcaggcagtaaactttacacacacaagcgcattgaaatctcatgaggtaggcactactgttttatatggagtagaactaagaccgagaacaggtgacttgctcaagatcataaagatgatatgaagttgtggagctccaagttcatgctctgagctatttgtcagctgctgcaatggtgacttactctgagagatcttctaggcatctccctacctccccagctgagctagggccaggagctgggaggtgactggtatgggccacgctgggctgggcccactgtattcttgagaagccaccctagtggtccctcccctcccccaacacctgaccaggccctgatgcacatggtccctcccctcccacagagataagccgtatctcctgtacttcaacatcttcagctgcatcctgtccagcaacatcatctcagttgctgagaacggcctacagtgccccacaccccaggtcagagcctgggacctgcctctaccccagatctcacccagggtctcaggttccagccccttagtgttctctctgcacccaggtgtgtgtgtcctcctgcccggaggacccatggactgtgggaaaaaacgagttctcacagactgttggggaagtcttctatacaaaaaacaggaacttttgtctgccaggggtaccctggaatatggtgaatattgcccctaacctcatcactgtcgcccagaagggccagggtgggcacgagagggagggggagttgggtagatcatcaccaggttggctctcctggggagtgtgggacaggctgagccccatggtggtggtgaggggacctgcttcttcatcctgctctgtgtctgtgtgtctgtcctttcactcctgccacagacggtgatcacaagcctgcaacaggaactctgccccagtttcctcctcccctctgctccaggtgagaagcacagattccttcctcagacgtcatctagtccagtgttttcattgcttgaatgaagaaatcaggcccagagagagtgaagtcacatagcttgttggtggcaaaattggaattagcatcaggtcttcattttgctctttgttatgtggccttgcagtcagaccatcagtgttttggggacctactatgtgccaggtgctggggacagaggcagggataacaactgctccctgcttcagctacattctaggtgaagagattagagttgttcacaaagagactgtatgaaaatctcatgaaaacatacatgggtgaatctacacacacattttttttttttagacggagtcttcctctgttgcccaggctggagtgcagtggcgtgatctcggctcactgcaacccccgcctcccgggttcaagcgcttctctgcttcagcctcccgagtagctggaattacagcacatggtgcccgccaccacgcccggctaatttttatttttattttatttattaaatttatttattaaatttgtatttttagtagagacggggtttcactatcttggccaagctggtcttgaactcttaacttcgtgatccacccaccttggcctcccaaagtgctgggattacagacatgagccaccacgcccagcctgcacacatatcatttttatatatgcacagggaaaaggctagaaggatatttgttcaaatgttataagtgaacgtggctgggtggtaggatcacagttgaactttttttcttttacagtgtgctcttccttccagtagcaaatgtcttttttttttttttaagagatgaagtcttgctatgttgcccaggctggtcttgaactcctcgattcaagcaatcttcccacctcagcctctcaaagtgctgggattacagacatgagccccgacacccagttgcaaatgtcatttttaatataaaacaatttttaggccaggcatggtggctcatgcttgtaatcctagcactttgggaggctgaggcaggcagatcacctgagatcaggagttcgagaccagcctggccaacatggcgaaaccctatctctactaaaaatacaaaacttagctgggcgtggtggcatgcacctcttatcccagctactcaggaggctgaggcaggagaattgcttgaacccgggtggcagaggttgcagtgagctttgcagtgagccaagatcgcgccactgtactctagccttgctgacagagcgagactccgtctcaaacaaaaattttaggccgggagcagtggctcacacctgtaatcccagcactttgggaggccgaggcgggcggatcacaaggtcaggagttcgagactagtctggccaacatggtgaaaccccgtctctactaaaaatacaaaaattagccaggtgtggtggtgggcacctaaaatcccagctactcgggaggctgaagcaggagaattgcttgagcccagaggcggagtttacggtgagccgagatggtgccactgcactccagcctgggcaacagtgagactccatctcaaaaaaaaaaaattagacaatttatagcataagatgagatatccagttaccaatttaagtacagtaaggagtatctcaagtgaatacttcaaagtcaagtagatctgaatataaattctagcactttccagccctatggtcttgacccaactatgcaacctctctgaaccttgtttcctcatctttagaatgtaaatgacagtgaggtgcagtggctcacgcctgtagtcccaactgctcaggaggctaaggcgggagggtcacttgagtcctggagttggaggttacagtgagctatgattgtgccactgcactccagcctgggcaatagagtgagaaaccctgcctctaaaaaataaataagctaggtgaggtgactcacacctgtaatcccaacactttggggggctgaggtgggaggattgcttgagcccaggagtttgaggccagcctgggcaacacagcaaaaccccatctgtacaaaaaatttaaaaattagccaagtgtggtggtgcacatctatagtcccagttgcttgggaggctaagtggggaggatcgcttgagcccagaagttcaatgttgcagtaagctatgatcatgcagctgcactctagcctgggtgacagagcaagaccttgactcaaaaataagtaaataaataaataaatagataaataaatgacaaagcaaggctgcctggcaaagttgttgcaaggatggcagtaagtggctctgtaggcacataacagttgccaaaggaggtggggataaggtcagaaggcttcctggaggaggtgagatggagctggatttgaacagggagtcatggatgggatttctggtggaaagagagccctgagagagaggcacagtaagagcaaaggtacagattagaagggaacatgggctggatttggacaggagagcctggaagcctggccagggagtgtggatgctgtctctggggcagagcctctggagatgtctgagtcacaaagggacccagaaccctggagtgatgaagtccaggcagtgccacggtctccctggcactccactcgggtggagggtggatggaagggtgacagggtgttctaagagttgaggccagcggagaggagggtccaaaccaaggcacgacagggaggggaggcaggggatagactgggctccacaggacagaagcccatttgtgaaatcaaaagcagcccactgagggatgcaaggcccatcacccttccctcccctaagggcactgtggactgggagggggccagagaccctccaggcagagctcctggcccccaacccagcagcccggctctcccttccagctctgggacgctgctttccatggaccaacattactccaccggcgctcccagggatcaccaatgacaccaccatacagcaggggatcaggtaggcacctccctcccccacatcctggccacaccccttccacccacagccccatctgactctgtctccccaacagcggtcttattgacagcctcaatgcccgagacatcagtgttaagatctttgaagattttgcccagtcctggtattggattcttgtgtgagtcaccagattcccctcctcttgtgtccttgccttcttcctccctgatcctctaccccctcgcccaatgtctgaaacacaggctttggacagaggaggaggagccagagctccgaatggattccaagaccaacaggatttataagggaaagaggcctaatctggggacattgggtggtgtgtggaaaggcagggagggcctctgtaaggggaaagatttgaggggctagggctgaacctcactgtcctcaccctgcctacagtgccctgggggtggctctggtcttgagcctactgtttatcttgcttctgcgcctggtggctgggcccctggtgctggtgctgatcctgggagtgctgggcgtgctggcatatggcatctactactgctgggaggagtaccgagtgctgcgggacaagggcgcctccatctcccagctgggtttcaccaccaacctcagtgcctaccagagcgtgcaggagacctggctggccgcccgtgagtgtcctgcccacccccaagccaccagctgcccaaggactgccctgggccatgcccggccccagccctggccctgacctaggtctgtctgccccatcctctgcagtgatcgtgttggcggtgcttgaagccatcctgctgctggtgctcatcttcctgcggcagcggattcgtattgccatcgccctcctgaaggaggccagcaagttagggcctgcctgggagggagatggggttgaggacagcgtggacccaggagtgctaggggacctagggggtgctagagaggtggcagggagcctcagaggagaagggaggaatatagcacagtggtgaacactgctgtggctttgcttccccatctgtaaaatgggggtaacaataattcctgccttctagggttgtcttgaggattcaatgagtgcctggaatatgacataggccttctagaggggttggtgggagtggtggtggctgagtggaacggcaggaatccgggccaggaggggcagcagcttgctcccgatcaggaactgccacacacacctgccaagggatcacgcttgggggtgatcttcccttactccacccgaagctgccccaggtggcttctctgtgaccctagtttcctctaagggtcctgtgagcctgatttattcagttctgtttatccagtgagcacctacagtatgcctagccctgcaccaggccctgaggacacagatatgaaagacaatgtcactaaccctgttggtcccaccctgggggagtggggcaggccccagtgagggcagcggggtcagcccccccctttttttttttgagacggagtctcgctctgtcgcccaggctggagtgcagtggtgcgatgtcagctcactgcaaactccgcctcccgggttcacgccattctcctgcctcagcctccggagtagctggcactacaggcgcccgccaccatgcccggctaattttttgtatttttagtagagatggggtttcaccgtgttagccagcatggtctcgatctcctgacctcgtgatccgcccgcctcagcctcccaaagtgctgggattacaggcgtgagccaccgcgcccggccggggtcagccccttgagaagatggacagctggggcggtgccggttaacagctttgtctccctgcagggctgtgggacagatgatgtctaccatgttctacccactggtcacctttgtcctcctcctcatctgcattgcctactgggccatgactgctctgtatcctctgcccacgcagccagccactcttggagtcctgggggttgatggaaaacaaagcaatacttgccttgtagagtgccttggtgtcactggaagaggtgcccctttctctgggcagacacaccagcactgtgcctgaacagagttgaaagggtgcacacaggctgaatttcagccctctctgtgcagcaaacgatctgcacaagcacctaggaacaggtccctaaggagcgagtgacctgtggagacctcgtgtgatcatgctttccttgactcccctctgggtacctggctacatcggggcaaccccagtatgtgctctgggcatccaacatcagctcccccggctgtgagaaagtgccaataaatacatcatgcaaccccacggtaagaggaagcaggggacatggaggcgggactagtaggggtgaggggctgtaggggccacattcctcattgtgcagagaagactgaggccacagagggcaagacacttgtgcaaggtcacacactcaacccccagcagagctagaagaaaccagttcccagaatacctggtactcctgttgagccatccatcatgtggggagggaaactgaggctgggagagacagccctggataccaggacttactccacccctccccaggacattgctctgacttgaggaccatcaaccacttcaccctctgagtctcagcctactcctgtttgtttgtttgtttgtttgtttgtttgtttgttttgagacagggtcttgctctgttgcccaggctggagtgcagcagtgcaatctcagctcactgcaacctccatcccccaggctcaagcaatcttcccacctcagcctcctgagcagctggaactactagcgtatgacaccacgccaggctaattttaagctttttgtagaggcaaggtcttgctgtgttacccgggctggtcttgaactcctggggttgccccgatgtagtcaggtacccaagcaatcctctggcttaacctcccaaagtactgggattataggagtgagccaccacatgcagctccattcctctgtaaaatgaggataattataatacccatccctggggtggctgagaagatgaaatgactttgggcacataaagtgcttagtacaatgcctggcacctgataagagctcaacaacaggttgaattgtattatattgttaagtcttactcccttggaacacagagccctaggtagtagccaggtgggactccctgcgggggacccgagagagaagctgcttccaaaattcccctgtgaggttccccgggagtggcgctgggctgctgggaatttactcttctcaaacctgtcatatcttcacctcgtctgagctgggaacatgagctgtgctgcaggcattagccccacccctattaaaaaggggaggtttggcaggcgcggtggctcatgcctgtaatcccagcacttaggaggccgaggtgggcagatcacctgaggtcaggagtttgagaccagcctggccaacatgacaaaaacctgtctccactaaaagtacaaaaattagccaggcatggtagcaggtgcctgtaatcccagctactcaggaggctgaggcaggagaattgcttgaactcgggaggcggaggttgcagtgagctgagatcgcgccattgcactgcagcctgggcggcgagactccgtctcaaaaaaaaaaaaaaaaggtttatttacatgtacagaggacccactatgtgccaggcactgggtatacaaagcccaaaatgatgtggttctttttctttttcttttttttttcttttttaatgaaaaaaaggctgttacacaggctggagtgcagtgatgcgatcatggctcactgaagccttgatctcccaggctcaagtgatcttctcacctcagtctcccaagtagctgggactacaaacaagtgccaccatgcccggctaatttttttttttaagagatggcgtttcactatgttgcccaggctggtctcaaacaaatgggctcaagcaatttgcctgcttcagcctccaaaagtgttgggattatacacatgagcaactgtgctgggtatgacgtgagtgttgttttcaacttgcttgtgatctagcagtaaagactgacagaaggccgcgcgcagtggctcacacctgtaatcccagcactttgggaggccgaggcaggtgaatcatgaggtccagagttcgagaccaacctggccaatatggtgacagagtgagactccatctcaaaaaaaaaaaaaagattttttgattagccaggcatggtggcacacacctgcagtcccagctacttgggaggttgaagcaggaggattgcttgaacacgggaggcagaggttgcagtgagctgagattgagccactgtactccagcctgggcaacagagcgagaccctgtgtcaaaaaaaaatttttttggttatatttgctagaaagggttgctttttaatttgtgactttttactttttattatgggaatttttaaacatatgcaaaagtagagatgatagcacagtgagttccctgtacccagattccacaaccctcaactttttgctattcttatttcatctatatcctcacctataattttttttttttttgagatggagttttgctcttgtctcccaggctggagtgcagtggcgcgatctcggcccactgcaacctctgcctcctgggttcaagcaattatcctgcctcagcctcctgaatagctgggataataggcgtctgccaccacgcccggctaattttttgtattttcagtagagatgggatttcaccatgttggccaagctagtcttgaactcctgacctcaggcgatccgcccacctcggcctcccaaagtgctgagattacaggcataagccaccgcacccgcctcataaatttttttttctggagacttttaaggcaaattctggacatcatgccatttcacctgtacatgcatcgagatggatctcaacagataagaactgtttaaaagcatagccactatatcattatcacatctcacaaaattaacaataattccttaatatcatcaaatacccagcctgttcaatttgccggaaagggttttggtagacgttgcagaggctgctctggaatgggaatgctgagtgagtgccttcccctctgattgagactgagggagctgattatgcttatgctataggcagaccaaactgagtttgagcctggagatggaactctccgacagaacttgattcccgcagtccagagaagctacttcccacctgtcaactctgggaggggcaggagctactgggaatgggacgcccaggctccatactgaggcccccgatgcctgagcctactctatccccgtctaccctcccaggcccaccttgtgaactcctcgtgcccagggctgatgtgcgtcttccagggctactcatccaaaggcctaatccaacgttctgtcttcaatctgcaaatctatggggtcctggggctcttctggacccttaactgggtactggccctgggccaatgcgtcctcgctggagcctttgcctccttctactgggccttccacaagccccaggacatccctaccttccccttaatctctgccttcatccgcacactccggtaaggatggggcaggggcctggtcattgtaggcacgggggccccaggggtcctggagctgtctctgactgcataacaccctctgcagttaccacactgggtcattggcatttggagccctcatcctgacccttgtgcagatagcccgggtcatcttggagtatattgaccacaagctcagaggtgagtctggagtcggagtaggagtcaggagctggggaaggccattagggaggggcagtgaccaaacatgagccttcctcgctcccaggagtgcagaaccctgtagcccgctgcatcatgtgctgtttcaagtgctgcctctggtgtctggaaaaatttatcaagttcctaaaccgcaatgcatacatcatggtgagctacactgcaagcaaccctttgttctggtgccctttggtctagacacccccatcctggtccaggcagctcgccttggtaactctgacctttccacctccctcagatcgccatctacgggaagaatttctgtgtctcagccaaaaatgcgttcatgctactcatgcgaaacattgtcaggttaggctgctccccccccgctttgtggctccctcctctgatctcccacccaaggctggcttcgtgggtgtgctgtgctcagtcgggccctagacttagtttagtgctctgctcttgccatcttgaaacgtgaacaattttcattttgcaccagtccccacaaattacgaagccaatttcactctcagcattgccaggcctctcaccctcaacctgccctaacttctggcacagggtggtcgtcctggacaaagtcacagacctgctgctgttctttgggaagctgctggtggtcggaggcgtgggtaagggaccagaagctgtggggacagagggtaggggtgctgggcagctgaagaggtggcctcagaggtgcagcactaacccccagaattattccacaggggtcctgtccttcttttttttctccggtcgcatcccggggctgggtaaagactttaagagcccccacctcaactattactggctgcccatcatggtgagtgactcccctctctgctgctccacccccaactccccagaggaacccaataaccccaacgggtcatgtcttccagacctccatcctgggggcctatgtcatcgccagcggcttcttcagcgttttcggcatgtgtgtggacacgctcttcctctgcttccgtgagtgacacccccagccacctgtccccaaccttaaagtactgagccgttcaagcatttttttttttttttggagatttggtgcttctagaaacaatgcctttgtgagctaaacgaaccagagggagcttcttgtgacatcctgaggccaggcgtttagggaagaaggaagagagtgagcccccaggccggtaggctctccaaagaaggagcattctgatggagaggtctctgctatcttccctaagaaatctcgggtagaagttagccattagaggccaggcatggtggctcacgcctgtcatgccagcactttgggggaccgaggtgggcagatcaccctgaggtcaggagttcgagaccagcctggcccacatggtgaaacccctctctactaaaaatacaaaaaattagctgggcgcggtggcgggcgcctgtaatcccagccacttgggaggctgaagcaggagaatcgcttgaactcaggaggcggaggttgcagcgagccgagattgcgctactgcacttcagcttgggcgacagcaagactccgtctcaaaacaaagaaaaaagattaaaaaaaaaaaagagccattagagagacttcccagcaggtggctgtagcggcaggggattttcttactctacagcatgcatccattcagggtttgccagtctcctcctaagcgactgacatgcattttttccgctaattcttatcatcgctctatgcaacataatattcccgaccccacttcacaggaggaaactgagattacataacctgcccgggggtaagggtggtggtgcagcttggattccaaatcccgcaggcagcttgcctcccagtccccgatttcctggccccagggtccgctctaaccggtctctgttgcggctcagtggaagacctggagcggaacaacggctccctggaccggccctactacatgtccaagagccttctaaagattctgggcaagaagaacgaggcgcccccggacaacaagaagaggaagaagtgacagctccggccctgatccaggactgcaccccacccccaccgtccagccatccaacctcacttcgccttacaggtctccattttgtggtaaaaaaaggttttaggccaggcgccgtggctcacgcctgtaatccaacactttgagaggctgaggcgggcggatcacctgagtcaggagttcgagaccagcctggccaacatggtgaaacctccgtctctattaaaaatacaaaaattagccgagagtggtggcatgcacctgtcatcccagctactcgggaggctgaggcaggagaatcgcttgaacccgggaggcagaggttgcagtgagccgagatcgcgccactgcactccaacctgggtgacagactctgtctccaaaacaaaacaaacaaacaaaaagattttattaaagatattttgttaactcagtaaa

SEQ ID NO: 721 - DNA, 53808 bp, Homo sapiens
agtgacattccatgagacaagcagtcctgtggtgaggcccatgtcaagaaggcctgagatctcccaccatcagctacagccaatttgtcagtcacgtgagtaaaccacctgggacgtgaatcctctcgacttaaccacctcttcaggtggccagagccctagcccaggtctgactgcaacctgatgagaaaccctgagtaggaagacctgcttgagctgctcccaaattattgatccacagacactatgagagataatacgtacttagtgttcttttaacccactacattttggttggctgtatttattaccctgtaacagatgactaatacatctcctgtgatcaaaacacttcagaggttccccatttctctcagagaaatatccaaagtccataaggcctgtgaggcccctcacattcttcccacccccattacctctctaactccattttctaccactctccttctttccacctcaaccacagctacagtgacttctttgccctttctcaaatctgcctcagggcctctgtactggacactctctccccactcccactccctcctccaggccttcactgaaatgtctccctctcagtgaggacttcctttcctaaactgcagtacccccaacctacacacacacacacacacacacacacacacacacacagagtctctagtcttcctagctccttaatttttttttccttagcacatatcactatttcatataccatatttgtcatctattttctggtttccctttctcagatgtaagctaagttggtgcaggggtttttgtctgttcccaatgtctagaagagtgtctgatttacagtagacactccatgaaatttgtcaaatgaatacaccagtgttaagagtataagagtgtaatagtacctttaaaaatgcctcaaagataaatcttttgatttatctttatttttagatctctacccccactttagccacttctgaaatttactactagaaaaaccttttctttcgtgaagaactgtctcacaaaaatagcagttaaataggaagctatcctaacccactgtttgccttttcccttgtgaaactcagaccaaaattgaaagtcatctattgtaactatgtgttcttggcatctaaactctgttttgtttcatcttgactttcttaatttcctaggttttttcctttgttcctattattttattgtttttattctatattgcttcaaagactttatgaaattaagtaaattataaatacaaatataagtaagtatactagtcttttcttaagctcacaacaaattattacaggtatctttgattcagtttattataattacagaattgtaaacttttcaaggaataaatctttaaaatcaacaaaggtaatatttttattatttattgggatattcttttttttcttttttttttctttttttttgagacagagtatcgctttgtcacccaggttggagtgcagtggctcaatctcagctcacctcccagtttcaagcgattctcctgcctcagcctcccaagcagctgggattacaggcgccgccaccacgcttggctaattttttgtatttttagtagacacgcggtttcaccgtgttggtcaggctggtcttgaactcctgacctcaagtgatctacccacctcggcttcccaaactgctgggattacaggcataagccactgtgcccaacctggggtattcttattgtaaaacattttacacgaaaaatatactttgaatcaggagagaaacatttcaacacagcatcattatttctcagtaaaatggcacatttttcctaatttcagattattcttggaaaattttgtttgcttctatgatataataaaattctgcttgaaaattacgtgttaaattgattccttctccatttccaaaaaacagaggaagggttattttaaacaataaagtggttgattatgttatccaatgaatcagcaggttttttactgccttcaccagtcatcatttctcattatacacagagatcctcaaaatgagcagcagatacactcagtctgtaggatcatttagcaactcggggaaggagggtaagtagcctagatttttttaaagttcccacacccaaacatctcaaaagatcataaaaagataaacaagtgttcagagattaaatatggaaaatattggtattggttttgattctatagacaaaaataaaataccacttggcagtagatttctcactttttaagtattcttgtatttggtgaatgggtaaaaagatagtcaaatgagttaaatatacatttaaataaatgggcaaatatgtattatcaattatcagttatcaaccccatcaattatttcatcatatctaaatacatataatatatattcctcggcctgtaaagtaaaccaaccccgtcaataatctcattgtatttaaatatctatttaatatataaatgttctacattaatatatttaatatttaatatgttggtcaatattaaatatgtttaataaagacatatttaataaataataaatatatttatatttcatgtttgtatacaatattaaatatataaatatatatgcaaatatgataagatcatttagggggttggtttccttcaccaggctgagaaaatagtttaactgccataaaataatcacaaatttaaaataatgacattttcgcacactattttcagagcagttttagatttatgaaaaaaatcgaggagataggaatagagttctcatataacccctctctactctctcacagttctattagtaacatctgcgtttgagttgtacatttcttacagttgatgaaccaatattggtacattattatgaactaaagtccattgtttacattagagtgcactctgtatgttgtatagctctatgggttctgacacatgcaaaaggccccagatgtagtgtatctaggttaatgttctatacgagcttgagaagaatgcgtattttgctgcagttgaatgagatataactatcaattaaacccaggtgatgatggtactgttcacttctattatattcttactgattttctgcctgttcgatttgccaattactaatagaggaatactgaaaaccccaactgcaataatctatttgtgtctatttctccttgcagttttaccagtttttgccttacctattttgacactctgttgtgaggtgcatacacaggattgttatggcttattggacagctggcccctttatcattatgtaatggccttctttattcctaataatttccttgtctgaagtttgctttgtctgaagttaaaatagttattctagctttcctttgattagtgttagaaaaatatattttgttgggcgtggtggctcatgctgtaatctcagcactttgggaggctgaaggaggaaggtctcttgagttcaggagttcaagaccagcctgggcaacatagtgaaacctcatctctacaaaaaattaaaaattagcttgttgtggtggcacatgcctgcagtcccagctactcaacagactgaggtgggaggatcacttgagctcaggagttcacgactgcagtgtgccatgactgtgccactgtactccagcctgggtgatagagtgagaccctgtttcaaaggttaaaaaaaaaaaaaggaaagaaaagaaaaatataactttctccattccttttgtgtctttataattaacatggatttctggtaaacaacgtagagttgatgcctgtattttattcaatcagtcgttgtcttttaattggtagaccatttatatttagtgatacttgatagagttggattaatatttcccatatattaattgttttctgtttgttgcccttgtaattatttcccttttttgtcctcccctcttcatatggtttggctctgtgcccctacccaaatctcacgtggaattgtaatccccataatccccacctgttgagagagggacttggtgggaggtgattgggtcatgtgggtggttttccccatgctgttctcgtgatagtgagtgagttctcacaagatcccatggttttataaggggctcttcccgctttgcttcctctcacctgctgccatgtacaacatgcctttgcttctccttcgccttctgccatgattctaagcttcctgaggcctccccagccatgcagaactgtgagtcaaacctctttcctttataaattacccagcctcaggtagtatctttatagtagtctgcaaatagactaatatacctcttttgctcccttttctagttttaattgagcattttatatgattctattttctctcctctcttagcatatcaattatacttaaaaatatgtttttagaaattgtcctagagtttgcagtacacatttacaactaagtccacttttcaataacactataccatttcacaggtagtgcaggtactgtataaaagattattcccagtgcctctctcctgttccttaaagcattgctgtcatttatttcatttattcataaactaatatcacccaatatattactgatattattattttgaagttatctatgcgatcaattaagaataagaaacaaattataggttggtggatttttctttcaacactctaaatatttcactctactctctttttccttgcatggtgtctgagaagtctgattaattctcatccttgttccttataagtaaggtgatagtttttcctctgactcctttcaatattttctctttattttccacaatttgtatacaatatgcctacatgtagtttttttaaaatttatcttgcttggtgttatctgatcttcctggatctgtggtttgatgtctgttattaattttagaaagttgtccaccattattagatacctagataactattatttatgtatcttctgctgctttctttcttttccttctggtattgctattacctgtattttatgccttttgtaattttcatacagttcttggaaattgtgtttctttttcctattctgttttctgtttccatttaagtttgggaagtttcaactgacataccttcaagctcactgattcttttgcagctatcaaaagtgattctcttttctattgtagtattttttgttctctaacatttccttttgattctttgagttttcatctttctgtttattcgttcttgcacttttcccagttgatctcttagcatattagtcatagcatattttaaatttccagtctcataattcccaaatccctgccatatctgaatctggttctgaggcttgctttgacatttcagagctgtgttttttcttgccttttagcatgccttataattgttcattgaaagtgaggcatgatgtatcagataatagaaaacaagataagtagacctttagtttttatgtgtattgggccagaagttagactgtgcttaatggttgttgtagctgtaagtatcagaggcttctattttctctaatatctttctttttgtctcccctatttgttgtctttgggttttcctagagactcatttttaagcagagtctgtgtcttgcaactctctctagttgtgatccacagttattataccaaaacactatttatgtggtcgtaagatattggagagttgatacattctataatgttatgataaaatctctatttttaaattcttatttctttttaaacaattttagattcaggaggcacatgtgcaggtttcctacatggatagattctgtaatggtgaggtttgggcttctagtaaacccatcacccaaatagtaaacattacagccaatagataattttcaatctgctctcctctcccacgtttccctgttttggagtccctagcatctattattttacctttatgtccatgtgtacccattgtttagctcccacttataagtgagaacatgcagtacttgattttctgtctgagttatttcacttaggataatggcctctagctccattcatgttgctgcaaaggacatgatttcactcctttttatggctgcgtaatattccatagtttatatataccacatcttctttatccaatcaactactgatggacacttaggatgattcctaattgtgaatagtaccccaataaatatatgagtgccagtgtcattgattataacaatttcttttccttcaagtagatacccaatagtgggattgctgggccaaatggtacttctattttcagttatttgagaaatccccatactgttttccgtaggggttttactagtttacattgtcattaacagtatatacgcattcccttttctctgtatctttgccaacatctaaaactctgttttctagttgtccagaatccctgagctgtgaacttcataagggtttcttcttttgtttttctccttatgtgagaaagaaagtgtagaaggtgttcaaactgtctagttgccttttctctaattcagataaagctctggggtaaagtttaccttgaggacaggcttttgtttctgagtatatttcaaatagttattgttttcctcccacatgccagaaaaaagaggaaacttttgtcctgtcttctgaaagtaaaactcattaatgtgtggatgctcccatatgaatgactcccactgtctctgagttttcaactctcaagttagtccacactcagccttcagcaataggccaaatactgtataaatgcccccctatcctttactggctccagtggcttttgctgtcctgataagctgtaattctccgtattcacctatttcttcagtttgcaaagaggtggcatgtcctatgacatcaattctctgcagatctaaaaagagtagttgatttttgatttgctcatttttttcttgttgtgatgatggaagtggagactttcacacctttcaaatgtcagagcagaaaccagaagtcctagtaataatgttatatatatatatatatatatatatatatatatatatatatatatatatatatctcttttgaccacataaaagggggaggtgcacaggtcttattattatcattttacatataagaaaactaaggtttaaagagattaaatgagtttccatgagaaatattgctaacagacgaagctaaagtcagaacctggatcttctagtgtctgccaggactctcccaatacagaccattctgtttaggcattcatgtatacgaaacaatttgaaagaaaaattttagtttaagaatagagtcatgcatgtttggatttgctctgtggcataatgtaaaaggcaatggcctagcatatccctaatgaatcttctcaggcctaattcagcccccaactcacttttagactttagaaattctcagcaaatgctgacacaagcttcagtttctccatgtgagtgaagcaagaataaaccacatgatcttgtgaccatgaagtgaaacaattctaggttggatttaggccctatatttttggaagcaagtttgtgtatgtgtgtgtgtcttaggtgtgcatgtgtggaaaggggaactgatttcttcaaaatctttctgaactgctaaattaatcctcttccttaagtgaaaaagctttgctgctttaattctttaaatgaaatgttattttgccttcccatctgctcatctgacatgatagtctatggatgtgattaatgtttaaggcagaacttccttctaggaaatgtcatattttaacagtccttgtgttttctccttcctgtgaatgctacacccattaccaaccactggatggtctcgggttaaatagcacttcctcagagaaggcttctttgaactcagactagcacagaacctacacttcccctttccaacttaaagtttgcatcctttggtgtatgcgaacccacatgaagagatgttttttttgttttgttttttttttgagaggactccctcactttgggagggcgaggcgggcggatcacctgaggtcaggagatcgagaccatcctggctaacacggtgaaaccccgtctctactaaaaatacaaaaaaattagccaggtgtggtggtgggtgcctgtagtcccagctactcaggaggctgaggcaggagaatcgcttgaacccaggaggcggaggttgcagggagccgagattgcaccactgcactccagcttggacgagagcgagactccgtcttaaaaaaaaaaaatacagataaatggcctgtacagataaatggcttaggtgcatctacaaagaattagtgattacaagtgaaatcttgtaatgtcacaagaaatgttaatgacgtcagtggtgcagatgaatttcttaataccaagtggaaaaattcacttgagataatcttttacaatggtgtgaaattcctcagacttttgttttatccataaactgcacaaataatacctccctctgtgacacttagagagggtgacatgctgagagtttcctgaataatcacctcttgaaatacacaaaactcttctagtttcctggttgaccgacccagggcttgacgactccttttgagccacctgacaattcagtccagcacagcaactgaaggaaggcgttccccaacctgctgtcctatgaaggcctctaggtcaccggtgctaaagccctcctttctccaccctccttaagtggaggtaaacgtcccagcaggaagtcaaggctggattggcgctcttcgcgagcaccctgggaacgggagtctgggtcacgggtgctagagccctcccctctcctcccggccggtgtatgggaaattgtccccgcagaaagtaaaggctggccaggccgcccccagcacgtagagggaatgagtcaggctccggctccacactggcacgtagtgggcggatcgcgccggcgctgagtaggaaggagcttcagccgccagcccggaacgcagtgagtacagccactcaaaggaaagccaagtcgctttgcaggggagcgtctcatgatttttcagaaacgtgctcatggttaaaaagaaaaatcaaggctcggaataaatacattcaagcactgttaattttagcccaaagacaggcggtacttgcctggagatttgggaaaatcaacatgaaactaaaaatgaaattttagttggagtggagcaagcagtattgatcagaacataccaaatacgaattttttcaaagtctgcgtagaagtttaaattactaggaaaaatgtaaaggagaagtatttactaataaatgaaacaaaagtaataaaataaaaatgaattaatatagtttgacaaaatatcagcgaacgctgaaaagaaaacattaaaataatgtttgagactttttaggttttgtgcaggaagaattgggaaaaatgtgctggatggagtgatactgcttttcttttccacaaaaatttcattattttagagagcggtagagcctttttaaagacagtaagttattgccaattcacaatgaaataagatcacatgctctgaaatgtacaagagctgcatgcaataaacttcatttatctataggtaataactgattgatgtttattcagtagtcgaaatgcacctcatgcactctaattagcacgtcaaattagtctctccgtttcagaggtgtagggcctttgtggagccttctcaataaaataatttgccactcttgaaggttagacattctcttctatcaatgtacacataaaggttttgttttgctttgcttgttgtgaattaaaatggggagaaaatgatgtgttagctatcacccagtcatgtgtctttttagtcataggttagcttttcaagacacttcctgcatctctgacctgttgcacctctgttatcttggcacctctgttatcttagcagcaagcacctgcctcagctgacccttgagccataacccatgtaagtcactgcagggctgaacctctctttgagcctaacagtagaataataattatttttattgaatagtgttaatgtgtcaatgttgaaatgtgcctcagtgtgtcttcctcaaccacatccctatagaggatgttttcttaatagcaatgtgtttttgttttaagaaagtccacacaatttcaaatacacattttctttactaaagtttattgaccagttttgaagtgatccttgttttcagttaaactatctttaataatggtaaataacatattttgtaggttgttgtatatttaatattctctgcaagaacacataaggaacaatacatggacctttaaatatttgtcattgtgaaataaaataacaaggaaaggtgatttcaggtgtactttattcaatacatatatacaagaagttattactataacattaaatttgcaggaaaaaagaaaccactggattattctgcttctattccagagggcttattccaaagggccagtgtgcaaaatatgaatccaagatggcattgtggaaagacgctgtacctcctgtgataaaattactttggtggtgcttttttctcatgtatctcgggaaactaaaaatctgaattgtattcagtggccttttccaaatggtaactttatgaaaaaatgtctaattcttggttatttgtggttttagtcctttcttcatagagaagctaaagctgttaaataagcttagcagcgttatccgctaaaactttctgcagtgatggaacctacacaggagaattttttttgtaatgtactaaaaatttgtcttcagggcttgttctttttaaattgtaggctagtgatcaaaaatatttggtgatagaataaattaacatgaagtacaaacattatatatagttgtgtaatatcctatctgcaaaaaggagtcttagcgtgcttttgaaaaattcaataaatataatatgttaatcacaatttggtcacagattcacgtctcaattgtttcattttttcttttatttcagaagctcctgaaaagtacatcaagtctaaagtgaaccagctaactcattaagactggaatcatgagcaacaatggagcagacctaacctttggttacatctcctgttttgtagctatccttttgtttggctcaaattttgtgccacttaaaaaatttgatactggtgatggtaattatttttccttgattgttaacgttatattatttttaaaaatgaagttccttttttggtcttttaaaagtatagctacaaaaataaatcatgttgatcttgatacctagtgaatagagcttaaaattagtcatttgacagtgctcataccagtttgtctgaaagtcagaataggagaaccattaaggttgtttcatggtaaagttagggagggtacagtcaggaaatctcttgggccattatatgaatggaagaaatttatagtcagttctactataacacctgttttgaaaacatgaatcttcaacatgattgatatattagagaacaatgtaagcataacagatttttggcttgcttatgtgcaattttgtccctgagaaacctctagataggcacagaagactgcacctagatgaataaagatgtgtgataatacacataatgcacgcagacacacgtacaatcttcaaatatcgaccagctcccttagttcatcacatgtggttatgatgtattccacccaaccacatctcctgtcccaactcctcacccaataccttcacagtaactcgtaagctgcaaccctttggatgctcacttccaggagcaaacttctggtgtttttcaattaaaatgccctatttattacagcatcatgtaattaaccagttaaccagttaaaactgtactactattttaattaggttgagtgttgttctcctagccccattttcccattatgctctgtagtttttactgcatgattttgcatagtgcagtgatttcaaggaatgcacatgttacattatagcagaactgactaatgtgaattttggggaaggagaagcaagagttatttgtatttgcctgacttccatattaaagccaggagaaggaattgagatttatggtgaacacatgttgggaattacttccttggtagtatttatcacctgacagcagttgtgttatttccccaattctttgtcttcgtgcacttagaaaataggattacctcctattttcctccagggcctttcttctcttttcctctggagttaggacaagaatgggaactacccgaagaacaaaaaaatgggtagaggatctagcttttttagtcttccacaattagctttgtgatcctgggcaaatattaccagctctgctgttttcagtttctcatttgtaaagtgaacaacttataaaatgaagtttcttttcatctctgtgattctactctttttattttttatttttcatttttttggggagatagagtctcactctttcaccgaggatggagtgaagtatcataatcttggctcacagcaacctccacctttagggttcaagtgattctcatgtctcagcctgccaagtagctggaactacaggcacacactaccacacccggctaatttcttatatttatggtagagacggaatctcaagggctggtctcgaactcctgagctcaggcagtccacctactttggcctcccaaagtgctaggattacaggcctaagccaccacgcctggctgattctactcttttgtcatggagattagcagccatcttttctctctcctccatcatgagattgaatccaagaggggcaacaatcttccaaagttagtgccagaagtaatacattgagttttaactgcctcagtatttctttcaatgtcaactatttcctcatccttttaatctctaaatccttaatgatgcagaagcctcaaaaaggtacagatacacctcatcaccaggttatcttcagataactggaaaatggcaactcaaagtatagaaagcagagtaaccttgacctagatagctaattctcaggtttataatgcccgactcatcataggcattgaactctaactgtatgaggcctatgtgtgaccataaatggctttatttttatcccagaggtggcataaatggtccctgaaggtttactgttgtgctattccgaagcacttactgccatattttgggaagcaagagtactcagtgtggcatctgaatgagaatatacactcggtcttgccatcactcttgggcagaaaattcttgatttgtctaataggaggaaaaaaagaatgttaagccagagcacaccgtgtctaagccttggagtcaacctgggtttaaattccagctcaacaaactactagctgtttggacaggttgcttaattgaagattcattttctctatctttgagctagggttaattatgttgcagagtagtcataagaatgaaatgtgcaaagtccatggcatatggcatttaataaattgtggccattcctgtaatatcacctcatagatattcctgagcacaaatttactcaattcaatttgaaccactaacactgagtttgtttatttctaggaatgtttctccagtgggttctttgtgctgccatatggttggttgccttggttgtcaatctgatattacattgtccaaagttttggccttttgcaatgcttgggggctgcatttgggcaacaggtaatgtctgatataacttatacttttattatgtaacataatgataaaaataattctcgttcacaataggaggaaatagcgcaaacagtgattctgaataacccttagtcatagatactagaaattaactagtttcttgccttcacatgctcaatgaatatttttggtgccttacctgatttgttccacctgatttattcctcttaatgatttatttttaagttcctggtagaaaattattatagtaaaaacattttaattattctccatctattcaagcatagctcatatattattttaatgtgttctggcccttttttctagcatgtttatcagaaaatatttattaaatagtaatctctactaataaaatttttaggacttaacctaattaggccaatgtgaagatactatcatttcaaaagggctggttaacagaaaagcaaagcaaacaaaaatcttcctgttgccttatcagtacctgaaattatataattagaattcataccttggcttggccaatcaagaaatgtttcccttcaattaatataaatacaccccaggaggtctttttttcttcaacaaagagaattccaagtatcagtgatctttagaaataatttgcattaaaagcaaataaatgttaaaatgttaaaactttattaaaaaaattaaaatgaaaatttatttattacccacttaatttgagtctctgaggagttaaatgatttagtgaagttcataagttagaagataaaagaattcgcttttaaattcccaccaggatttacattattatacctcacttatacctcagtatgattgcttgtcatatctaacagggggagaggaacagactaagcatccatccatcctgcagctctttatagccaccagagcatttctgttcacccagcaggttccactgggtgtcagtggggaaagagtccaatttgagatatgttgcagatgtggatgctataggttggagcaactgatagcatataggacatagcagaatgggaggagccaatgataatgtagagatttgattataggtgattaggagggtggtggtattgacacatatgtggaaataggaaaaagaacatgtttgaaagagaaaatgatgggttcagcttggcactttctgagcatgaacatcccgatgtttctaccatagagaacatctggttggagatttcttcttgatggtttggagaataatattaaaaccctaaagtaggtccaggttagaactgtagcactgggaacacgcacctttagctggtagctgaaatcatgaaattaggtcaagtacccaaaggacaataaagcaaggggacaaatatgttcaagggaaaatctttagggggtaccttattccagaaggaatgatgaaaaatagtagccagagaaagagctaaagagaaaaacaggaggagactcaagagatgaagacatcatggaatcctaaagaggtaaccttttaagaagagactgtaggacttgagacaaaaaaaaaaaaattatgtatttggccctcagtgaccctcaaaacataagagaatgaatgtagaaatccagaagacaaatcagcaatcatggaagagcaaattctgggcctgttttatggccaagtacttctgccagtatttggccctaattcaagtctaagaggatggtcactgataatttatcactgacagcttccatgaagaatcacagaatagagagctatgctaagggagagaaacctctgtacaattaggaattcaacacttttctttgtagacttttttcctaagcctagttcttttagcacacatactcataaatttaatgccaaaaatgtggttattttactgaaaaaataaggaactgtgctttactaaatttgtccaaatcacatgcacttcagttgaagttagaataaaaactaattctatttataaatgtattttctatatggaaataacatgtttcttctgtatattacatctacagggaacattgctgttgtcccaattatcaaaaccattggtttaggccttggaatcttaatctggggatcatttaatgccttaactggctgggcaagctcaaggtaattcaagtcaaactagttcaactaagatttcctgcatccatattctatgtaaagcaagtgattaccgagaggaataacatatgattcttattctcacagagtttatagctggtaaaacatacacatcatatatgccaccttctattgctatttgccctaaattcttaataagtgatctagatatttgatcaagatatagtgtagcattaaatctgggaaacagaggtagagagagaaaaaggaaactgatttttattgtccctttctattgtgtgacaatttgctggacatgttctatgcatcattctcatctcactttcacaaatacgtgaggtaagcactatcttataagagagtagataaaaagagattaagtaacttactgtaggtcacagaactaagaagctaggattcaaacccaggtcttctagttccagagcacatattctttcctctagagcagggttggcaaagcacggtctggtttcccagccatttctataaataacgttttatcagaacacagccaaacccatccatttaaggattgtctatggctatttttatgttacagtggcagagttgagcagcaagggaataactgacccacaaagcctaaattatctacaaccgccttcgagaaaaagtttgccagtcccagctctagcgttgtgttgtccaatagtgtagccagaagccacaggaggccatttatatttaaatttaaattaattaaaagttgataaaattaaacctccagttttttggttgcactagccacatttgatgtgctcagtagctaatatggggagaggctactcttttgtgcagtgaagatagagaacagtcccatcattacacaaagttctatcagactggtgcccttggtcagcattaagattaacattcaaatcaattttgggaaaatgagtggaatgtggggtgttattctcactttaccttttggactccctttccactcaaagcattataaccacctcaaaacaacaaaacaaaccaacttactaacttccaatacattctctcccatccttcccccattccccacctcctgctattttctttttcttttccttcttttctcctttcctcttgcccctggatggttctcagtgattcttggtaatgatcacggcaatgtcaggcaggaaaaaaaaattgtggtgatgacagagtagggatatttaacctagaaattttttaaaagtctactccaaatattatacaatattgtaaccaattaattaaccttccatgagtcaggtgaactactttttcctacttcttttttagtcttaggaaagagacactcacaagtacttttatgtatactaactcatttaatctttgtaacaaacttataaggtaggtataattattatcccattttaaacatgggaggctgggcacgttggctaacgcctataatctcagcactttgggagatcgaggtgggtggatcgcttgatttcaggaattcaagaccagtgaaaccctgtctctactaaaaatacaaaaattagccaggcgtggtaacaggcacctgtagtcccagctacttgggaggctgaggcaggagaataggttgaattcaggaggcagaggttgcagtgagccaagatcataccactgtactccagcctggatgacagagcaagcctccatctcaaaaaaaaatttttttttaatttaaaaaaattggaaattgaggcacagtgaagataattaactttcccaaagtcacagctaataagtgagagagctagcatttgaacccaggaatctggcccctagtccatgcccttaaacattatggtgaaacatcttaacaatatttaatttgatgtgactttctggattttcaggtttggctggtttggattggatgcagaagaagtatcaaatccgctgctaaattacattggagctgggctatcagtagtaaggtacacagtcatttctagtgattttgctgttcttcaaaacatggagagtgcttttttaaggatcctgctatgtttacattttttaaacctacatttcgtaaaatccacatgcttgttcctcagattcttcatttacaatgactggttttagaggacaaaaagtgccagatttgggggcaggggcagccccagctttagctctccaaaactctgagagcctggaaaatcatttaactgctcttaagcttagttttatcatctataatatgtagaaaatcataacacatagcttatcaatgagaatcatatattttgcaaactaaaacatgctattcagaaaaagcattctgctggcttcctgatgcccctggagtagtcactgattctctcttctatgtactactcacttcctatctcacctagtttccacttcccctgtctcctcactcactcttctcaacctagctagacagctcctctttcacctgtgagaacacatactcttttgaatgcccatgtttggttgcatctgtgtctagctgtatgcactctacgaataagggtgaaaatgactttgaatctctgtatggcagtgttcagtccataaaacttaacaggaactgggtcaccttaaattcagtcttctttcccctctggattccatttatattccctgtcagttcttcacataatggatagtactgcctagaaagattttagtacttttttattcttagggaaagaacagtatatttgccttccttcagcaatgatggcttttccccaggcacattcaggaacaatctctttgtcattgaaatgttgccttagagagtagtcccaggccaattggagaaaaagataacataaattattctaaaatagcagattcctgactttttttggttagaggcaattttatgtattttgtataattcacacagaattctagctctgaatagctctctcaaaaacaatttctttacacaccaaaattgtaacataggatggcttagttttgacttaatgacaattgaaggccagtttacccagtctatcaggcattgttttcctccatatttcttctttatttagaaaaagtacattctctaaaattgcaaatcaattattcatgttctaccacttccacctatgtggccatgggcaaataacttcagttctccaagctttggtttcttcatttgtagagggataataatagcaccaacctcataaagtattttgagggttaaatgaaataaaatatgtttagtgcttcatatagtgctaattacatggttaatgctctacatattagttgccattacaattattttattaataacatttatgttcaattactgtttccctgttgggtatttgttgcccaactttatgttacagtaggcagtgcacctgaggaaccctgtagctcaatttgaacttggtctgtagcagggaaattcaagaactcttcccgtagtgcatctaggctcccttctatgtttctctgctaagaggaatttctggaatatgtcatttcattattttaactcagttaaatcagtttgttctgaagggtattcactgaataaacttggagcttcatggtccatgtttcatgcacttgaaatagggttgcattcgtttaggatattgcttttctttttaaaattaaaattattgcttctatcctctgtatagtctaatttttaaaggttggttaatttctagtcttacattttctttatatgatatacaaagtgtctatcagtctgtatacaaaacctctccaggtattttaaacaggagaggatttaacacaggaaattgtttgcaagacccagttgagcaaaagaaggaaggttgtgtcacccataaccctgaagcccacacaatactgctgaattgcctctgcctgaccgactgctcctgctgaaactactggaggcaccaccaaaacataatgtcttctcccatcttctcaaatgatgcaagtgcctccccctggcagaacctagctgccaataaagtttgggaaatgtaattttcagtcttccatgctccatggttcaggagagagtatgtaagggtgagagcagagctgacaccaagaaacaatattcagaacactctgttaaacatttgctttcttgaagatccagaagccagaggtctataacaagacagatgtccttttcaattcaaataataatatgatttggattatctttaaggacatgctctcccttcttttgtcttctcatttaacatgcctttcctggagggttatgtttactccacagcttcatctattattttaccttgtgaggaaacccaaatcatggtttctagctgtcacctttcctcaagccacagcccttatttctaactatggaccaaactacacatctctacacatactccacaggtacctcctttcagtcttatctgagataacacacagaagggaatgatgctgatcagcactttgccaacactaaaccatttgttcctttctctttgccttcaacatttcccaatcagaattacttttcttactggacccttccctgcaaactggttcctcttcctgagttctctctctccatagaaggccacagtcattcaaattcaaaacctgtcatctttatttttttccctttatatgctatgactattcctgtaaaaaaaattttgaatgtttcacaagttcttcctctgctttccctcgtcccatcctacctacccacttgtatacatgtgattgtaaaaaatctcacatctagtttccctggttccattcttcccttttgccagtatggatagttgatatctgccctacatcagggcatgtcattgtcctgtttaaaaacctttgaatgttccccactgaattcagaataaacttgtctccttaatctggcttgtcccttacagtacatctattcagccagtgtttctacacgtttcacctttctccctgtattgtgcattcattgacccaggattacaccacactccagacatctccctcagccttgaaagccttttcctcagcctccttggccatcatttaatatcatttgagattgttccatcccatgtgatgttttcttgattttcttctctctagttagactcttcccctaaactaccaaaactttttgtgcttcttccattattgaaactatcagagtctactttgtattacttatacagtcctctttattcctgaactatgatttcctgaaggacaaggcccattattttctatatacaccattcctcccaccatcaccatcaaactttcatatatagtgttttacacataattgatgcttagtaaatgtttgttgacttcagttgtcggcgtaactgcacgtgcacacacacaatttttactaagtgtgtgatgtacgggattgcaaatctagggaagctggaaagcttgaaaatgtaaagaagaatcattgggtaaaacatcaagtttccttttaaattacctatgcctttgacggcattcatagactttatcatggaactttgtatttgatgtactgcaccaagttattttaagtctgtagcccaaaacaccttgtgatttatttggttttatgttcatatacataaaataaatttgatcaccttctccttacttactgccacccactcccttgatctaactgactgggactcttctttctgatttacctattcttatgactagcattagttgcacaggctcaaaatcattgtgtattcctaatttctttttcatgctcagcaccccgtcacctatccatttggtaattaaggctttctctttactaacatgttttcagattttattttgtgccagaagtacactgagaattgtgtatgcattctcatttgattttcaccacagctctgtgatgagtgtatatccccattttttagttgaaaactgtcaagtctcagggagtgatttgttggagggttgtacacctgtttgaagtaaaacaatcaagagccttatctatagtgtccttttatttatttattcatttattttttttactttaagttccaggatacatgtgcagaacgtgcaggattgttacataggtacatgtgtaccatggtggtttgctgcacctattgacccatcctttaagttccctccccttgcccaccaccctccaacaggccgtggtgtgtgttgttcccctccctgtgtccacgtattctcactgtttaactccaacttatgagtgagaacatgcagtgtttggttttctgttcctatgttagtttgctgaggatgatggcttccagcctcatccatgtctctgcaaaggacatgacctcattcctctttatggctgcaaagtattccatggtgtatatgtaccacactttctttatccagtctatcattgatgggcatttgggttggtttcatgactttgctattgtaaatagtgctgcaataagcatacatgtgcatgtgtctttataatagaatgatttatattcctttgggtatatacccagtaatgggattgctgggtcaaatggtatttctggttctagatccttgaggaatcaccatactgtcttccacaatggttgaactaatttatattccaccaacagtgtaaaagcattcctatttctccacagcttcgccagcatctattgtttctcttttttttaataatcgccattctgactggcctgagatggtatctcattgtggttttgatttgcatttctctaatgatcagtgatgttgagcttttttcatgtttgttggtcatgcaaatgtcttctttggggaagtgtctgttcatatcctttgcccactttttgatggagttgtttgttttcctcttgtaaatttgtttaagttccttgtaaattctggatattaaacctttgtcagacaggcagattgcaaaaaatttctcccattctgtaggttgcctgttcactctgatgatagtttcttttgctgtgcagaagctctttagtttaattagatcccacttatgagatctttaatcttattttaaaaactgtggtcatgggaggctcagatgagtcataaaacacatcaggttggtcatttcctgggctacataccttgtatagaataacattatacaaataagtttttttagagttctcgtacacttataataaccgtaaaataataggaccgtagcaacctttcatcctacctcagtgacttgatgtatacactgggaacagccttcggtctgaggaaggtcagttgaagtccttactatacaagtccaaattttaaggaaaatgagttctgcgatgagtttcctcatgcttcggccatgcgtggaccagtcagcttctgggtgtgactggagcagggcttgtcgtcttcttcagagtcactttgcaggggttggcgaagctgctctcatccacgtacagctcccagtctactgatgtttaagggtggtctcagaggttgggcctattagaataaactgagtctaatacctctacacagttatgttcaactgggctctctaataccgagagcaaggtggcagggtcagggtgttgtaaacttcaatggttatgcagggattttcacagagcaagctttgatatctagttagtctagcattcattggctagtaatgtcctttggtatttattaaagtcaccacagcatggggggactttatgtttaggttttgcctaagagttagcttatctgcttcttgtgctaacagggccattgctgctaacgcccttagacatgggggccagcctttggaaaccctgtctagttgttttttttagagataggccactggcccttggccagggccctatagtctgggttaaaactccaactgccattttttttctgacacgtagggtgtaaagggttttgtcagctcagttagccccagggctggggctgacatgagtttttcttttaactcatgaaaagcttgttgctgttggttgtaatagatgtagtttatctaaactacatttttattaactgtcacccactaaaatattgacttaaatcctgtagctatttgattttaagctttaaattgatctggtattccttgtggggccccaattgcatctaaatagatacgagagttgaaagacctataaggggcttctctcactttacgatgtcttatttttttctccttctggttgatgaaatgccagggtgaaagggatagccaaatggactaaagcacaagtgccatgctagttattcggcagagtgcccagtaaaggtccacgacaataccaccacacatccgttcagggatgaacaagggctgactgattgataagctcttgaaaattcttaaactcatcacatcctttcaggtctctaaggaatgctgtttcctccctgtcgtgagagacacgaagtgaatttagtgttgggagatggaagctggatggccctcgggggctgacccgcagggtgccggacttcgggatatagcagagagagcttggcatgacttattactccaggctatagaatcctggaaaagagctaccatgcagcctatgcctggtcgactggaggaccaccttagtggagcgggggacaatctgggcctctggcctgccatgtgcacaagcataacaattgcttttgtttaacgtgcagatggaatatttgatccattttaaccaggcatttgcatcttggtatcctgtcttaattgctaaagtttgttttaagtctttaacttctatgatcctctagtaaaatgaatgtatgatttttataccagataagctaaattttacctttatattagtgtgttattaatgttaaacttaattttaataaaatcttgtagacatatttatccaatttttaatgtttgagcataaggtaagattttatagactctttttaatcttttataatttttgctaaagagcaggttggtgatttaggaaaagcctgctatgcttttattttaatggccagtttacagaaaaactgcatgatacctctttaactttagccaatgtttacacatggaattttctttctaattaacattttaaaacttgattaaacctttaaaacaaaatatacatatttttaaccttttaatgtaggtaaaaatttatatttttatgccttcttataattcttttatcaaaagtatattttattttctttatacaccttgcacataaactgttttgttttgtttttgtttttgttttacattcaggaggcctagctacttttaaattatacaacatttcttgcataaattcttttttataacatttttataacattttttctctttcacaactttcgccgacaattctttgacatgctttaactttctgacttattacaaatatttttttctttaaacaaccagttaatttatttcagggcaagaatttaccatataatactctttttacataaatcccgccccccctttttttcttttctttttcttttgaagatgataactattctttctaaagcgaacttcttttatgtctgtgggctaggctgtctgaggccacaagaatagaagttagtataatacatgttacactgttaacttttagcaaactttacttttgttgaaaaccttgtaagtttgggattttaattatcctttgctattaataagaccttgttttgtccaaattaatttagaattggtatagatggcttttttttttttttcctaacggaatagcctcataccttaatatttttgagttagtaagctgcttttttgcttttttgatttaggatacttctgaactgaactagtgaggtgtgctcacgatgaggtttcctctaaaagttatttttgttttattttttttctgttaacaaagcagttgccgctacagactgaatgcatttgggccatccacgggttactgggttaaggatttttgataggaaggcctcagtgctttcaggatacgccattgtttacactgacaatgaagtggtattggagcattatagggttacagagaatactttcaattatcaattacaggttttaaatttactttggcttttaaaggaataaggtacactgttttttttcttaactacttatatatatatctctctttctctctttctttatctctttgactttgtctctctctgactttccttttgcctctgtctcttcctctctctcttctcgcttattctgcagttctctcaaccactgtggagagctctaaaaccagctctccaagcgtatatgtatagaaccagtaaccaaacgtctatgtacagaaactggtctgggtgccctggctttacaggttaccttgggccatacctttgaaacaagagacctgtccaggcttctttctgatggccaacttaccttcaatgctggccagtctactttacacaaagttttaagttttcctggtgtcatagtactccatagtctcctttaaatcctttcttgaaatttttcaatgtatttcctagtagggtcagcttatctgtgcctgacccatgcttcttcgaggcaaaacaccatgctcacaccacacacacaccacaaagcaaagaacgggtaaaaaggcacacacacacttttgcagtttacaccaaaccaaaatcaaaaccaaaatcagagtatccagaaatccaagccaggtcaaaaccaaaaccaaagtatcaagcaatccaagtcaagtcaaaaagaaaaaccaaagtgccagtacaggcacaccgtgggtgatcaggccacgcttccactcaaatggagtaggcaagttcccaagaccagtcctgtcaagtaatcaaaccaagtcaaaaccaaaaccaaaatcaaagtgccgataaaggcatgccatgggtgatcaggccacgcttccactcaaatggagtgggcaagttcccaagactggtgctgtcaagcaattcaaaccaagtcaaaaccaaaaccaaaactaaatcaaagtgccgataagggcacgccatgggtgatcaggccacgcttccactcaaatggatggagtaggcaagttacaaagactagtcttaccaagtttcagatgtctggactccaagtaccagttccttcccagtattcagccactgcgtcgatcctccacaggggcctgccacacactgctctggtgaggcatcccaccggggcaaatgcctacccgggagcgctctcaggatccatgtcgcttgggctggtcggagtccctcgcagggatgttccacagggcaggcttaagccgcctaaggagctgcatcgaccatctgccaatcacctcgcttcccggtcagggaaccaagaaatgtagcaggaggagccgcagacaaaactcctcagacacggagttaaagaaggaagtggtttattcggccaggagcatcgggcaagactcctgtcttaagagccaagctccccaagtgagcaattcctgtcccttttaagggctcacaactctaaaggggtccgcgtgagagggtcgtgatggattgagcaagcagggggtagttgactgggggctgcatgcaccggtaatcagaacgaaacagaacaggacagggatttttacagagcctttccatacaatgtctggaatctataggtaacataaccggttaggccattggtcgatctttaactaccaggcttaggtcaggcaagcccaggcctggtttcaggtctggttccttggttttgggtctggttcctaggcgccgggctacctgcctttagtttcgcttctcttcccttttctgagtataaaacaatatgaaaaggtctgtctctcttctctcaaggtcactcttctgtagggctgctgtggtttgctgggggtacacttcagggcctattcatctggtttgctcccgcgcttagagatgttactcaaggaggctgaagaacagcaaagatggatgccttcttcttcatctgggatctcggaccccaagaggcaccaacctgatgccagtaggatcattcctgtacagggtgcctgacaaaccctgttagaggatctcacccagttgggtggcatggggaacaggacccatttaaggcagcactttgactgtcccttttggagggggtgagcttcgctggggggaaaaccatttatctggtctatccagattcctcagaactactggaggaaaggctaactctgctggtctgcagagactatggccaaccctcccactaagggaggcccagggaggctagggttctgtccctgagactcaggctagagttgttggagttcctgcagggaggccccgcccagtgagaaaggatgggtcagggtcaggcctgaagaggtgctctggccacattctgccacagacagtgtgttgggctttagggaacacttcttggggatcaagctctccagcctccctggctccggcagtggaaaagcatggcctggagctatagagctggatgctacccttccctcacccagggagcttagcgtgttagatggtaatgagtcccagtgctggctgctgccccttccccaaggagctcagatggcttaggcagcaggcagctgcagctgtggtactggtcacccctcccttcgggagctcagcaggctgaggcagattccagcggagaggctgttgagaatctgcatggctctagtgttgggaccctaggccccagtggcgtaggtttgcaagtgggatcttccaatctgtaggttgcaagttctgtggaaaaagcatggtttccccagctgggtagcatgctcactcaccaattcccttggctggggtgtgggggtcctgcagccctgtgtggctctcaggtgggccactagaccacactgcttttccttcctgaccgttattatgtcagccacctagtcagttctgatgagagaatctggataccttggttgccagtgaaggagtcacacactaattatcattctttttgatgtgagcctctgattgctgctgttactagttgtccatcttggtcccacccatcctatctgtagctttcaagtgttttctaacatatcattctgtattgtttattagaaaaacacacaggtctatacagagtagaggattttcgttgtataattttgagaacaaaatgccaattgatgtctaatattaaccttacaaatatatatatatatatgcacacacagaaatacatatttacacaaatatgtgtgtgtaaatatatatataatatatataaaacacacatatatgtaactcatatatattaggctttatgcattcaattttactacatgttaaatatcttgaggaccctgaaggagatataagatgtggtttctactgtaggggtggaaaggtgtgataactttcttccctatcataagggtcatggctgacactcctataataaaagacaggttgacaagacaaaaacataacaaatttaatcaaagttctgcatgacatgggaacctgaagacccaaagacccagggaaaaaacatctgtttttctgcttagatttgaagatttgacagccatgtagaaatgtaattacacaaagggtatgatctaatggtaatagactgaggggagaaacatagcaaaacccgcctgttcggattcttcttggtctctttgtatagtatttcttcttctttgatatacagcaggacccctctggaatgagggtcttatgatctagacaaggtaggtcagagaatttctttatagccagctcctacacagaacgtggagggttgggggttgttggagtaactgatctaggtttcatggctggttttgaggaagagggattctagtgtccataactcatctttgagaagaggaattctaatttctgtggcctgctttgtgggagaaaggtgagtggaagccatcaaggcatgaggaagtcaaagagagactttccttctgaggctgcttctgaggccttccaatctcctatagttcaaagtactcagcacgccgaagtgccgtaatttggggtatcattttctgaccccaacattggcttttattgaattagaaaatctttagagaaaaaaagattacattgtggcaaatggtctagattgtgtggtaactattcttagtgttgtggggattcaaagaggaagattcagtgaggactggcccaaggggaagtttttttttaaaccacattcaacacttcaactcttctttagtttggacaggacaaagagtatctagggtgtccagctagggaagaaagagaagcaagtgcaagtcgttgtgaaaaattggggaggggggttggtagacagcttggagcagggagtggtcaggcatagaagccaatacgaggatttatgttgagataggttggatggaacataatgcagagagccataaaaatcaaaaaggaaagttaaatctcatatggaaaggaatatgaaactattcatgttttaaagcaagtaagagattgaacaaagaaacctaactagagcattttaatttttacacaaaagacagcatatgatagacactcttctgtacctagctacctaccctatttcagtgtcatatatgctttgaaagcttcttattttgtttgaaatgttgaaccatgcaaatgtattttaaaagtatttcaaaagagatgttaaaagtatcccaacgttgttcattttctcaagttaatttaatcttttgacacattttaacaaatttgcatggcttaaaagccaagagtaagtgaggcatttgttgcaaagatacaggacatcaatagtgtattatgagagagatgttaaagggaaaaatgtcactagatttaaatgtatgtttttatctcttaaactatatcctggagatcttcccatatcagagcatagagatcatcattattccatttttacagctgcatagtattccattgcatgaccatgtaggccacctcacctgagtttgagtgtacctgtgtgagtgggcctccggcaggattggtaaggtcagaagtggacacaccggtggcctcagtagatcaccccagattctcctctgtgtgagttatacagttctgcacttctatcagcagtatctgagagtatctgtcccctagcgtttgtccaactgaggatgttcaacttttgaagttggtcgatataatagctaagaaatattatttcaatgtagttttcatttgtgtttcttttacaatgtgatttcaaagttaagggaaatatctgatgtagaaggaaagcttatgagtttagcctttagcctgttgtaattaaggaaaatgagaaacatctaagagaataggagttctggcaaaacggcaggaccactgaaggggcaatttgaaagtaatcattgtatcattaggatccgattatttaaggtgtgtgtttttttcttaaaaatcaagcagcttgatataaaccagtattatgataaatatcactaaaatttattttccttacagtgctttcatatttttgttcatcaaaagtgaaataccaaataacacgtgttccatggataccactccattaataacagagcatgtgagtatagtatgagagacaacttgatttgaaacataaaattaagataaatggataatacataaattttaaacacagatgaaaaagtggtgtttgctcatcactcctggctatgtaaaatatcttagcttatttattatgggtaggtctatgtagcaatcaatcaatatttccgcagttgagcttctcagcaagcacacgggtttatttattttgattaacagatctctactaggtgatatatatataaccccatttttgtaatgatttaaagattcctacaatagaggaaccctaaatactgtagaggaatgtgaaaataactttagaaagtcagaggaaggaggttttgaagttggtccaggggagaatagaccataggaggccaagaaaggtaagtgaagtcctatgagaataggaactggtatcccattctacccgaagtgaaaaacagaaaatatgataggagtcactgttttgatcttgaagaatctaaatcagtctggaatagtaaatctgaatgaaacaggagcaacttttaaaagggacctgataaagcgcaagtgtcagtagctacatatacaaaagtgacttcagggcaaagcctcattgtcatgaacccaggctctaatccttctcatctcaagaaatctctcctgtctgccctgggccagtgctatccagctgccctctgaatccagcgctcctcacccccagtggggtattgccccttggcagggtgcttatttaccccttacttcaaaattaatcttttctcctttccttcttcccctatccaaacttttatcaactaaaaccttagttaaattgacactaaagttgaatagtaattagcttaagtgtaaagagaagaggtttattaatccacaggcatctctaatcagggaaatgtttcagggagaagggaggagttggctttgggaaagggttccttgcctgcttcagggatccagacacctcctgcccaaccatcctccaaaacaatggaacaaaataataaaataaatgcagcttggtaaaagatacacagtaggctaactgcctgagatttttctaggcaataagtttaaagatccataaacagcatgattgatgggtacagaaccatgcatcatgagctccttatgatgaaagaaaccgttattgccaaaggaaaacttgacttagcacatgacaaagaattcaaatctactttcttgtctcttacaaaaataataggattataacatcaagaacacttcagttggccaggcgtgatggctcatgcccgtaatcccagcactgtgggaggtcaaggtgggcagatcacctgagttcaggagttcaagaccagcctgtccaacatggtgaaactctatctctactaagaatacaaaaaaaaaaaaaatgagctgggtgtggtggcacacacctgtaatcccagctacttgggaggctgaggcaggagaatcacttgaacctgggaggaggaggttgcagtgaatcaagatcacaccactgcactccagcctggacaacaagaatgaaactccatctcaaaaaaaaaaaaccaaaaaaacacttcggctatagtattataatataccccccttatccacagggaatatgttccaagacacccaaggaatgcctgaaaccacagatagtaccaaacctatatatagtatgtctttgtatctgatcactaagacagctactaagtgactcgggggcaggcagtgtatacgatatgaataggctggacatagggatcattcacgttccaggtgagatggagaaggacgatgcagggtttcatcacactattcagaacagtgtgaaattgaaaacttatgaattattcatttccagaatttttcatttaatgtctttggactactgttgacagtgagtaactgaaaccacagaaagtgaaagtacagataagggaggggtactgtaattccatagtagaaatatgaatttgctcataatttttcctggcttagaatatcagcctaatattgaaacatggcttggaatgttttattaactaatttagtaaaaaaaacaaatcagtataagaaatgctcattgatcttaagcattccataggaggagagtctaatttccttacagattatgcagaccattaaaatatgcaaatgaaacatgagataataagttttattagtttttataggtgtatcacaatagccacatattaaatgtgagaatttgaaatggaagacttgccaactgccaagtcatcctaaatgaaagaggaaacaattagaaacagttgagtttagagatatcagaatgcataggtgacatgtttattatattttaaagcatgtttgaaagagaagagaaaagcactagaaatattgtcaccagtgtgattatcaattgaatgttcttttgttttaatttgggccaatgttttcaataggtgatcaacacaacccaagacccctgttcctgggtggataaactttctacagtacaccaccgcatagtgtaaggagaggttacttctttgctctattactctgtttcatatttggttaaagcagggattaccagcatgaagtaatgttcatctgagttcaagaagaaaattgtaatgcaagctttgacttctatctccatgcggcgaggtttttttgtccccagctgaattttaggtacagatgcccttgagctcaactgctttgagtaattactaaatcattgcatttatctccaaatgataagtagataataaaagcaacctaattttgcatgacttgtgtagctaaagtaaaagaggtagtaacgtgaccaacctgctctcagcagtcatagtcagattaggcaataaacttgtctagcactgcaccacccaggatgcccaccctgctctgggaatccccacactcctgtgtttagacagttatataattccagacattcattgtcaaatatagtggaacattctgtgtccgtgtgggtcctactccctctatctccataagaactcagggagttgggctcaacatcagcccctctactttagggtgttttttttgtggttgttctgttttttggacttccaaataaatatgaaaatacacactagtatatagtttgcattttacatttgatggctgctttaaacttcatgtggtgacaccttttgactcaagaatataaagccttctttttgatagcgtgtatgctatgtttacagggggaaagagcagcacctgacacatagtagatactcaataaatatttgaataatttgaatgaatgaaagaataacaaacaacatttggaagaaataaatatgttgctggttttgcgtcagaataaaaccaacctttcaaacaaaaaattttttcaaatttttttttcacaaagcctccccttcattaagatatttttaaagaaaaatatgttagttgtcttgtaattagctaggcttagtctattagtcttgtctgcgtttgggacgctccacggctatgaagtccagacctcacgtgacacagggatttccaggatgagtagaacatgttgccaaggtggtcttgtgaatttctacaggctcatgttactttatagtactatttaaattgactgatttaatttttaagctttggagggaattgtttttgcctacaactgtcttctgtttggaagggttttttgtgtgatttttttgttttttttagagacaaggtctcactctgtcgcctgggctggagtgcagtggcaaagtgctgggattataggcgaaagccaccacgcctggcctgttttctgttttctgtcattgtcctttgtgttaacttcaaggaactgttccaaaatatgaatcacctccccctacaatcattggaaatgcttgcttcatgcagatatggcccaagtctggggagtccgcctgactccagtgctgaaaatgaaacattttcttttttataaaaagaaatgttttgtctgaaatacccagattatttaattaaatcagcacttcttcttgaccatggcattgtcaactaaggcataggcaagttcgtggatttcaatagttgttttcaacaaaaatgcatttagtacttagtctgtcctagttctgtgctggatagcatggcctgttaaaatttttaaaaaatcataaagcatggtgtcagtatatagatatctcaatttaattagagtgccaagtttatttatgtagactgtacaatataactgtagcaatattctcatctatgtaatgacaacataattataatccattttaatttctataaatcatgtacttctaaaattagacactggtggactgaagctgtcctcctagtcctgatgccactttaatactgcagggtatttctgtgacttccgccagtcacagagcttgagataaatggatggtttttgcttgtttgtgatttgccttttgaagcatgtttatgattccatttgtgcgtttgtcagaaatactgctttgagccaagattaatagtgatttatttgttttgtaaggggctgcagtcttgcagtgatatctggagtactctatggatctacatttgtgccaatcatctacatcaaggaccacagcaaaagaaatgatagtatatatgcaggggcaagccaatatggtgagaataaaaagttatcttactttattaatatctactttttatgaatataaaaagaattgtgataatagtaaatattgatgggtcgattcgatctttctttgtccttgtaagtggcgaattagaaaggcattgaacaccaaaaataataaaggattgagcattttcatatgatctttaacatacaaatgcaaccaactttagccaggactcttttcaactacttggatctcaacacatggtttctgactttccagtaagatttggaaattattttccagttagatgatctctgggaaaatatatatacttctgttcttttaaaaaggctaaagtgtagtacatagtactttaaaatgaggtaaaggttaatgtatagcctacttggtcagaggatattatttttaaagtacagagtcatgcactggaaggcccaatgtaatgcttcctgttaatatctcagtttccattgacagaattaatctcccaagagtaaactcaatactatatgcaatagccttgtacaggttcaaaaggagatgaaagtgtttactttggggatctactaattatgttgaagcatggcttacaaccatgaaatgataagagaataagatcattcataaaataaagttctaaatcagatggcacagaaaattaatgtgacctctgttcagataaaggagaatttggagggcaaaagtcgtgagggaaagattgttaaagaagttgagatttgaactcaactttaacagaatggatagactgagtagatgccataatttccatcttcctttttatagttagccccatgtatattactcaaaccttttactgacttctgtctttcttttgttaaaattttatacaaatacttttttgcatttttacaaaaagatagaaattaataaaaatagaataacatagaataaattaaaacaaggtctcactaaagaaagaaaaacaagagtgggtatataaaaggaaccagaaacgaatctaaaaactttatactacatttgtatacttgctagaaaggaggcataaatttggctcttagagtccttgtaggcacaagggaaatcagatcagtctcatgattcaatgagcacaagataaaaacaactaattgttcaggagcacagatgttcttggtacagggacataataaacagtgtcctcaccaatctccacacaaagagaacaatggcttcttagggatcttgcttgtgacaactctgaatgtaatgtgatgggaacactttatcccagtttattcaaaaataatgaggggggattatttttatttcatttatttaaaaacacatatgtaatatgtgctctgtcctaagtattttacaaatactcagttaattctcatagcaactaataccctttctttgttttacgattgagaaaattaagacagagacgtgagatgatttgtccaagtcccaaagttagtgagtattgaaatgaggatttgcacccaggtggtccatgcttttaatcactgtattttgctttcttttgtggtggtccatatatagatgtattgcccttacatgatccagaaataggatttaagacttagagcaacagacaaactctctgtcaaacttttcttcctaaacatggccactcatctttgtcaaaattttaggggacagaaacattaaatccaacatggctttcccagccaagaacctgtagtgcacccatctgtgtggccacagtcccatctgcttaaacagtcagtggagttgggatttttccgagattgggccaccatgatgtgatattaactcccccatgtacttcgttttataatcaacaattgaataaagccctctctggattaacttcctgaacagccttctgtacagctgtcatctgcaacagagatgctggtctccagattgatcaatggatcctgtaaagttagcacccccaatttttttcattcacattctcactgtggtcaacctgaggatttgctataattgctattgtcattagtaaaattaggcctgagtgcctatttttaaaagggaggtattaacatcatagttacataattcattgtttcttatttagctttaccagatgatcataaaaactagcctttagttttgattatagtaactaatttactacttaatgtatctagattttaaatatattaattaaaattctatatgaacagcatgtagaaaactaggatgattaaatataattaatggggtttttttttttttttgagacagagtctcactctgttgcccaggctggagtgcagtggcatgatctctgctcacttcaagctccgcctcccaggttcacaccattctcctgcctcagcctcccaggtagctgggactgcaggcacctgccaccacacctggctaattttttgtatttttagtaaaggcagggtttcactgcattagccaggacagtctcgatctcctgacctcgtgatccacccggctcggcctcccaaagtgctaggattacaggtgtgagccactgcgctctgcctaattaatggtttatttgcctttaaggttaattctggtgagtttattttcagaaatctaaatatatctggaatgattaaaatggtgtttgagagtttttaatgtctattttcagatttagactatgtgtttgcgcacttcagtggcatctttcttacaagtactgtctactttctggcctactgcatagccatgaaaaatagtcctaaactatatcctgaagcagtcctaccaggtaagaatatgtactacagatcttcttactatatgaaagtgtcatctacaactcatttaacttgaataagtttcttctggaaacaaagccatcctctgtgtgtatatgtggtgtgtgtgtgttgtgtgtgtgtgtgtgtgcatgttcattccccctaattacttttgcccagttcaccaccaaatatgaagtattttaaatccttgaaactgaatatgcaatgttggccattattacagaacctaaaacttaaacaataaatctactaataagatattttcctgtgccaaacatcttctgtattgatcatcattctttactatttctttttcactatctaaaggttcatatatcaacaaataggaatatgcagtaacttgggaaaacagtttctacaaaatgtaagaagagatcgtgatgacttcaaaaaagacatatgttaaacatacatgcttttggatttaattcattaggcattgatcttttttaaaaatctcatttaggagtttattatgattcaatttggaatgtaggtccacaagtaaaattttttaaaggcaaaaataaagcataagtcagagacttgttctgaatgcctaacagatttatgctaaagaatgccaccgtgtagaaaatgctagaatactgaatgcctagctaaagtgctgtgaaagttttagctggtagttttacttaaatactacaggttttttttttttcttagccgtagcatcactctgatccactttattaatatctatggtttacggtaaatggtatttgcagataatgttcgggttcagtatgtcccctagtccccttttcatcacccagtctctacctcttttactactatgggtactttaatgctgataatgtgaaagcattgatcactctacccatagcaggcaagagtagagaaattacttgctctaaaataacaataaaacacagctcaaaattccatgttggccaacaacattgattagaatgcatttatatgtgcactttgatattcctgttgtagctcagtgtgagttcttcaggaggggaacatggtctgcaaatgtgtgttgtctttgtatttcaggattcctgtcaggagtactttgggctatagctacctgctgttggttcatagcaaatcactctctgagtgctgtggtcagttttccaataatcactgctgtaagtagctgaactggttttcctaattttcattttataaatgtaaacccaatttttctgaagcactcttagggcatcgctaaagactgtcatggagtttgattttttaggaatacaattaatggattcagatagataaactgaccctcttgaatcttcatgtgcttgattgctaaggaacatttctcacctcattttagcagggctgttactccttaatctttaatatccttgcagtttttggtttgattggtttatctaatgtaattttagcgacattgtaatttgctattgataactattattctctccttatataaaagtttataaatatgggacctcttaaagggaacattgaaaaacaaacaaacaatatccttcacaaaacttttatagtagacagagagttggtttttctaccattgtttcttgttttgagttagaataaagactgaggacaaaatgaaagcctaattcaaaggaaataaaccactgaagtaggtgagtgtgggcagaggatcagtgaaagtggtcactgtggcttttggcaacctgcccatcacagagattattcttgaaaaactgtaatggaagcaaagccttctcactcaccaggcataactttcttaccttgtgcgcttggtgcttgttatctgggaaggacaggtatttggaattggtgagggagtaggtccctattgctaccaggcccttgcttggttttattttagtcactttatccaaggacaaccttatctacacacagaagagttagtccctaccctcaacaatcttacattcttcattattttatttttttggtagggctagatttttaaaacttttttaaacttaaaatgtcaaacgaacctatcacctagtttcaacaattatgaatatggtcaatcaattttatcagaatacattttaaatatcccagcagtgctgttcttctcaggtatacatattcccatagttatatatccagtggtaactagactgagttccttgaaagtagtatccactttgtttattagcaaataacattccattaaaaagctaaaaaaaaagaaagaaagaaagaaaaaagtcacctagcaggggctgttacctctgctccatgtcttccttgataattctaaactgaatcagcttaatcttaagataggagcgagttcactttgttttcaaaggctgatttacacctaacttacattagtttacaaaaggaaaatatacaatccaaattaccaaaactgttgtatctcctatgaagatgtccttcctatttggctctccttggcctgaatcaaagagtcagtacatactttgacctatgcttgcattacttttaccaaagcacccttcctgtaaccacactactcacgataactcttaggccatgcttaaactcatatttagaaaacaatcagacaagaatcttcaaaggtcaatgataccttgtggtattgtcctgtaccatgttctctgaagggaaatggattttcagattaaaaattcttgagtgattagcataacattaatatggtatcctctgttctattgtttcctctcattctgttgaaagtcagtgtgggttgcctaaaagacccatatgcttcttgtttgatttggattttgaggcttaggaacttacatcattgataaaaggcagttcctttgacctatttctctggctcttttgatgttgactttccagatactgataaacagagaggagtgtattttttttgtttcacttacataccaagagtggaatcaaacttcattgactcagtccttttgtcagttggagtagtggtaggggaaaaacattttggaatctatttgaaactcttccagagtttctcggagtttgaagagcaatcataaaaatgctgatacaatacaccttctccacaaagaccacacctagcccgcattccaattttcttccttctcagctaagaagaattaccaccaaacttgaatagcttaaagtttataaattgcagaaccattcctttttttcacctgtttcttctcatttcctctgtcctgtattatttcattcttttctttgtctcctgcccagaaacccctattgtttttccttacacgtttattttaatcttcccataaacctttttttagcattcattggtgtttaatgttagccagacttgattgctctgtagtaatatcagttaaaaaaatttttaaagcacgagctacttccacaagtacattatttgttaggccaaaaagaatatgccaaaatttcttcagttacaagattatctcatgccaaagaaagttagaagcttgtgcacactttttcttattaatcccatttctagtatcctaaggaactaggccaatggaaaaaataagctatgtgcttataaaaataatttatgtcagatatattaaagtattatgtggcacaaaatattatagcatcatcaaaataatcaaaatgaagaccatgaagaaaagaaaatgaaaaaaagtcttcattttttttacttaatatcacctaaagtttagcttagtgtggagttagggttgatattatgggtagttttccctgaaaatatgtttatactgtctctaacttactatatttatatagaatctagtcataggtaaatatccaatttaattaaaatttatatttttatttaagggtccaggatttatagctgcaatgtggggtatcttcatgtttaaggaaataaaggtatgtacaagaaagggcagacttagaaaatgggaatggggtaggccgggcgtggtggctcacgcttgtcctggcactttgggaggccgaggcaggtggatcgtgaggttaggagttcaagaccagcctggccgagatggtgaaaccccgtctctactaaaaatacaaaaaattagctgggtgtggtggtgtgcacctgtaatcccagctacttgggaggctgaggcagagaattgcttgaacccgggaggcggaggttgcagtgagtcaagatcacgccactgccctccagtctgggcaaaagagcgagactccatctcaaaaaagaaaagaaaatgggaatgcattcaggtgagtaaagtatttaatatgtttgtgttattatctgaaaactgcctgtggtgcctaggtccagggccaacaactcatgaatggatttgacagataaaatgttcagaatgtgataatacctaattaggaaagaaaatactagagctatgataattataatgtaacatcatgtctctctccaccccatctccaatggaaaaatgctgtcgttgacttaaatttccctgaagtgattttaaataacccagtgaaatatgagagagggaaatttgtttaaaatatgataaacaagatgaaagattttttttttatcctaaaggttaaagtatcccctgaggtaaatcatctttgggaatagatgtttatattggttcctatgtctcccaaagacctccatgtcaaaccagcaattttgtaggaaaacagcatggtaacaggaggctattgccatttccttttcaaatgtaaatgatgggaatttaaaattgcattcatcaaatagttctagtaagagtgtgtgtgtgtgtgtgtgtgtgtgtgtgtgtgtgtgtgtgtgtgtgtgtatgtatgttttctttaaaaatcactttgccgagcatggtggcatgcatctatattcccagctactcaggaggctgaggcagcagcatcacttgagcccaggagtttgatgtcagcctgggcaatcacaacgacaacaaaaggtacagtctcaagagtccaactgggttcaaatcctggctctgtcacatactagctgtgtgaccttggccaagtttcttaacctctctgtgtgtatagtccttatctgaaaatggggataaccaaccaagagagctgagagaatatgagtaaagtgctaaaaacactaccaagaacacaataaatgctcagttaattttgggggtgagggtcatataacctagcccaaactgtcgatagcaaaataaaacaagttaggagcagtggctcacacctgtaatcccagcacttgcgggaggattgcttgagcccaggagtttgagaccagcctaggcaacatagcaaaaccgctatctctacaaaaacaatttaaaaattagccaggtgtggtgaggaacacttgtagtcacagccactcagaaggctaaggagggaggattccttgggttcaggaggtcaaggctgcagcaagccatgatcataccactacactccaatctggacagctgagtgaaaccctgtctcctcaaaaaagaaaaagaaaaaaaaagaaagaataagaaaactcacaaaatcagagaacttctccccttctagccaggcatggtggcatctacctgtagtccaactatgcaggaggatcacttgagcctaggagttcaagtctagcctgggcaacatagtaagaccctgtctccctaacaatttaaagattttaaaatgtttaatctttttttaaaaaattgctttggaacttttcccagttacctttacttgtagaaaaagtcttcagttgaggaatatatgcaaatactcttttataagaatttttattaaagacaatgttgatccaaagacccctccccaatcaagtcatcatagacctgtcttaatatgcagttgtagtagcaaataattcctggttctaaggagattgatgttgctaatctctaacaaccataaagtgaatgtacttctacctgatctttaaaatgattattcaattttagatttaaaacatcatttcaatcattgtaaatgaaatattttgatttaaaatccattatttgataatacaagtaacattctcagatttaaaaaataataaacttgtttcaaaaatatgtggactatgatcagaatttttattttttttaaatacacaagaacaacttgaaacatttataaacctctaagttactttcgtgaacatttctcatttattgtagtcagagttcctttctacaaaaagtaactctatgcccaaaatatgttgtaaatctctctgcatatatttcatctacctcacaaaaaaagatttatttatattaaagaattggttattatctcatgtaagatgctgaagccttagaaaattacaaattagtcatcatagtttattagtaattataggtatgaagaagtacaaaccaagtatagatttatattaaagcatttgaaaattattttggtcatgactacaataataatactgaattgaaaatcctcttaactacatataagaaccctattcaaagagaatccctaaccaaaaagcctagtattaattgaaaaacagtgaggaatgttttgttttgtttttggtaaagacatctttaaaaagacacatcagactgaatagaaaagtaacttttaagattaatatactatgacccaatagggtttaattcaggaatgcaaggatcgttcataatacataaattaattaatatcatttactctaccatatcaaatatgaaaaggacgtgataatactatactaacctcttaataagctagaaataaaaggaagctttagtggtacagtatgtctatcaaaacaaaatagcaattatatacctgagtttcatgaaacataagagttctccatatattggaagtcaaggatttctccatactattatacgatatttcctatagatctagctagtttggaaacaccagaataagaaatgaaatgaataaatataggaaaagaaataagaaaattataatttgcagattacatttttaaaaaatgtacacattgtgatttcaatttattggtgacaaaaattaaaaattaaaataaaaatttaaaagaatcagctgaaaaatttaacatccaataagatcatttagtaaggcttgagatataaaataaatatgaaatcagttgccttccaatgtatcaccaacaaccagttaaaacgaggaaaataaatgctattaataataaccacaaaaattacataaaatctaattaaagaattaacaagtaatgtgccaggtttttaaaatactgtattttactttgctacaaacatgtactagaggacatagaagatcagaacaaatataggagacttgtcacatttctgatggaacatctcgctgttataattaggtagttctctctaattacgttcagtataattcctgtaaaatcccagtgaagctctttctagaatttttagagtaggtcctaaagtttggctaattatttatgtaaaaataggcaaaaaaaaaaaaaagcatgacagcacatataccatatttctgaaatgtgcaatttagattagctaggccagttttcttataaaataaggatttctaaacttaagaaaatgactgtttgctcttttctgttttaaaaaaatgactaagataagattacaagtattaaaagaagagagagggccaagctgaaagcaaagaattaaaaaaaaaaaaaaaaaaaaaacctggggccaggcatggtggcttatgcctgtagtcccagcactttggcaagccaaggtggccagatcacttgagctcaggagttcaagaccagccagggtgacatggcaaaaccctgtctctacaaaaatacaaaaattaacctgctgtggtggtgcatgcctctagtcccagctgtttgggaggctgagatgggaagatggcttgaacctggaaagtggagattgcagtgagccaagattgcactctggcctgggtgacagagctagactctgtctcaaaataactaaccacataaataaataaacaaaaaatcttatatgtcatctacaagcaaaatttaacagatgtccaatggtacttattcaatgcagacacctaattgcctcttgacagctgatttaaagaaaaattttaaatacttacatgccaatcagtttagaaaagcatcatcaactgaacactaaagcctaaatatcataagaataatttttaaagtatttttgtagaaacaggacaaaaacccctaaactctaaagaagaaaacaaaagcaaacctgttatctgcaggactcataggtactgtcagttatatatcttaaagcagtccttgaagacgcatatttaaaagtctacaacctacagctgcgaggaataaagctgagagccaagcaccttttgtgtgaaggactttaatgattccatttagttttaatgccatcagtgcatcagttggatgttttcatacttctgatactcttttttgtttgtttgttttttgagatggagtctcgctctgttgcccacggtggagtggagtgatgcgatctcggctcactgcaaactccacctcctgggttcaagcgattctcctgcctcagcctcccgagtagctgggattacagaagcccgccaccacgcccagctaatttttgtatttttagtagagacggggtttcacagtgttggccaggcttgtctcgaactcctgatcttgtgatctgcccgcctcggcctcccaaagtgctgggattacaggcgtgagccaccgtgcccggccctgatattcttttatatctgatatctgttactcattgggaaattcattttagattattaaatctttaagctagatataaattatatttttaccaacacactttagtcagtatgtctacagtaatgccaacacaggcagttactaccacaacaatgtataggtcagtaagctactccctggtgaagaatgagatgatctattatcttagtagaaatccaagttaaaaaactttctgctttgggaagaatgttagtgtgctctttccaagagttaacatccacctttgatgaaggaaaaccattgctgttgcccaactataattagtctttttctctaggagactggacagttttagcaaaatcttaacattgaaggggaaaaaaatttttcattccctgagaacattattcttctgtctacataggtaataaaatagcgcttagcaatgtattcacgtaattagattgtagagtgcttgtaactgaagacccattttttaatttaagtaattgcatcaatttcaaattcacaaaatatacgtggaaatcaccttagtgtatttgttgtttgaacaaatgtttatggaatacctattctgcattagtaccagtatctaggtgagaattgcagtcttaaaaattaagaaaaaaaaaggtgctgggaaatccaaagcctactgccaggtgtgtgtgtgtgtgtgtgtgtgtgtgtgtgtgtgtgtgtgtgtgtttaaataagctgttctgcacttggcaaggttttcgggtgcttctatttgtagaatttgggattaaagtggcttctgttagtgctaaggatcacactgaatcagacaattcaactggccccaacctaacttgcaaagacctatctctggtcatcaaacagaggcaaatttatctactctgattctttaagttgaagaaagggaacatatatatataatttagttagtaacataattatttgattttgttaattaatacataacatatatatatatatatatatatatatatatatatagttacatattagttagcattaatcttacgaactaataatacaaaagacctttccttggcagttttcacattccctccatcctggactttgtttctgttctgttcagatttattacacaaatttacctctgatctctgcattcttccagtaaactagaaacacaagacctttaaggaagtgtgagggaagtaggcaaaatgaaaccagacaaaagtccactctttgaagtgagaatttcactgtggagccaggagagccacgtgttcctactgtcaacccgtctatcctgccccaaccctgtttcctgtgggagcccagttagaacttccctttctgggtttccctcaaagctgacctggctgcaaggcagcaaagacagaaccaccctctaccctctgaccccttgcatctatgctgggggaaatgagtctccctaagcctacactttgcatggcctggctgtaggaacccaagtttggtgcatgttcttcactgagtccttgagtgagcattaggggagatactcatgaatcagattagccctgaggattagcctctaacagcccagggtcctgcttttatgaacccactccccccaacaagtcagtcaactcttgcaccaaaaacacagcattctattcccactacctttcctgaagttttgcccaaatttgggtagtgtgaggctattaacctgttggacctcagtggccagaattttcaccagagagggaggacaccagccctattccctacagatttgaagctggcaggataccaactgctgcctagagttgcttcctctccattccttttttctttttccagaacccttatgtgtcttctacaatgacttacccatgaaccattgttatttttccttttaagaaggatctaatagtattattaaatagtgttattatctgattgtaatcttagatgtatctaaaattagagaggtgctagtcttgttttactttgtaatgttcaaaccttcccttagaatactggagtcttccgccttggattcagactctcctgatgacccacccttgggacccttagaccaggcagccagagattgccatgccctcattggcagagccaatgcccttaatcagcaggaagtagatacagaagactgacttcctcccacatcaagccttaaggataagggatagaaatctttaagtgggggggatgagacaggaataatacagggtggtcacagattaggaaaatcccaggcagcagtttcacatgactagcaaaaggaaacttgaaatagctgcagaggccatgggctgataagaccctgaaaaacagcatgtggatcaagctggctaagaccaattgaacccaacatggtgctggatttgccctaggtttcacctaggacctcattatacactcattaacatacaaatcacacacccaccagcaccatgacagttctgggaccacccatatttggtgtaaaaatgagtgacaccacagttctgagaaattgttacctttttccaggaatcttcatgaatattccacccctcggctaaagaaatgatgaaaataggaaccccaacccccttgtatgattctctcttgagtatgtccgcactccactttcttgagtgtgtacttttcactttgcaacaagtctctgtactttcactaaaaaaataaataaattagactctttaaacataaagaaggatatagacaaaatggcagtcattcagggggagcagccaggacaataaggaagcttgaaaccattccatatgaaaaatggtcaaagagctaaaatactgaccaggaaaagagatgcctccagggatatatgagagttatttttcaatgattgaggatttatcttgtgggagagatattaaaatcgatctatctgtactcctagtgatggaacttataggaaatgaaatatttctacttaacacaggaagatatttcgttgttaattcaaagatgggctgggcaacacagagaagtggttctcagtagttcccatctttaagaccaggcaccccatacataactgagcaagtccaacgaagtcattcttcacaccctctctgcatttcttcctcacccttcagatccatctccatctctccatctacccatcatcatcttttccctgggagactacagtcacctcctaattggtctccttgcatccattctggcccctccaatctgtctgccatcctgcagaaaagtgtgagctttacacaatgcaagtctgaaattttaacacagccagctgcctgtctttttaatgtcttcctctttgcttggaaaaacaggacccaaatttgagaggcagaggtgggcagatcacttgaggtcaggagttcaagaccagcctggccaacatggtaaaactctgcctctactaaaaatacaaaaattcactgggcttggtgatgcatgcctgtaatcccagctacttgggaggctgagacaggagaatcacctgaacccaggaggcggaggttgcagtgagccaagatcacgccactgaactccagcctaggtgacggagggagactccgtctcaaaaaaaaaaaaaaagaaaaaaagaaaaaaaaatagaacccaaagcataacaagtgctcaggtccatggtcttccaacctcatcttgctccacttaactttgattgcttcagtcacactaacctcctttcagtccctgggaaatattttgctttttcttacaacaggactgtgcacataaaattccttctacctggaatctctacttgctgccctagtcccctggccaattcactgatacttgtagttagaagctccacttcccaccctccaaaccagcatcattaagattcctgtaacacactctcaaacaaccatggtggtttgctttattattaacacccctctcacataataacattcttttctgtgattacttcctgtctcccatattatatgattgtttgcataaaggtacatgttgaagcttagtgggtgcccacatttatttacggaatgggtgaattcataaggctctgcaggggtttgtgagaacctgattacttggaaggggtagcaaaaaagggtacaggcggctagagcagatggttaggtccctagcaatcttgagagtctgtccattttgtgtaattgattcaggccttattcatcactgttattcttttttcttattcagggtctacaaaactacctattaatgatacttgcattttgcatcatcttgactggagccttatgcactgctttttctaaaatctaacaatgacaaaaccagcaggtggcagcagtagttaagagaacgcgtctatcggacagcggagagatcatgctgagaaaagagtgcattttcatatagcaaatggatctcagccactgttggagtgggtaaatgatttttttccccaaaaatgtgagaatgaaggaagattgagtttcattcaagtataaaaatgaaaatttcttctgatgaactgtttatgaaggtagtactttactgggtgactaaaatgtctacattattatagcattacatacgaggatgctctttttaccacagtatgtacctagtgttgcataatctagaacacagtatagagtccatatacaaagaagttacagtccatatttctcacctattaccccagtgaagtgaggcagaaataccttgggcgaggagggagagccttaccttctaatggaattagattccaaagatatttggatcctttgtttcataaagtaaatgcatagttggtaactaaatgttaaaaaggccattttattattgttagccaaaacttctgtttatttcaagttaatatcgcccaactctacatcatctacccattttagctcataatgcttttgattatcgccagataaagtccattctcagagaacaaaaatttttcatcattgagaaaatgtgcataacataatacatacatacacaagtatattcacgtacataaatacacacagatatgttgctaaagtgagattgtaggttatcagtaacaatttaaaggaaacaaccactcttttgaatgtacaacttttttttctgaaatacacttttctaaaaccctcttaactggaggtttcctgttttcttcttgttttaactggtggtttccagtaggcaaaataaaatgacaggcatgctagttttttttttttttttttttttttaagaaaactgaaattaagccaggcagggtggcgcactactataatcccagctgctggggcggctgaagtaggagggtcacttagcccaagagtgcaaatctgccagcctaggcaacatagcaaggtcccatctctaaaaaagaaatttaatttaaatttgtaagaaaaaagaaaactgaaacagaactgccagtacaatgtttgttgcaattgtttccaaaactttgagataacgaaacccctattcaaatgtaaattttacccattcccacctgatagtactgtttattactttgctatgcaggagaaacaaaacagctttttatttgtgtgtatactctgaagtcaatgtgcatgggttaaatcccacctctgcttcattttatttgtgtggctttggacaagttcctaagccctctgtgtcaggcccctcattaacaaaatggagtttatgatggcatctacctcacatggttattgtgtggttgaaattagttcaaatctgtaaagtatgttgatgagtatctggtacttggcaaacactatataattgttagctttattattatgtgttgtttgaaggggaaaaaagtttttgtagattggagaacaccatgtaagagctactaagctcaccaccttcccatccaaacaattattactcctctaaatgaatactacttaaaagtgatggagcttctgtttgtttattgaattgctaatacaaataaatatttgactataacttcttatactcattttaattttaacctgaaatgtcattaaattatgctgataaactttgaataaattgtgatacaaaagctatttttctcatttaaatatattttagaattttatattggataacttttaattattctttagttgggatttccaatttatatgcaaaattttaaatgtgaagtaaagcagtttcagaagaaaaatg

SEQ ID NO: 722 - DNA, 15107 bp, Homo sapiens
aatgtccattagcataacccttcctcaggaagagtgagattttatatttgacaataaagtgttagactccatttctaaataccagacttcaaaagataaggttcaaaagtgttataagaagatattcctttttttgtcctagagaacttattttcctgtgaaaatgcctaccacaaagaagacattgatgttcttatcaagctttttcaccagccttgggtccttcattgtaatttgctctattcttgggacacaagcatggatcaccagtacaattgctgttagagactctgcttcaaatgggagcattttcatcacttacggactttttcgtggggagagtagtgaagaattgagtcacggacttgcagaaccaaagaaaaagtttgcaggtaaatgataaactaatttgaatgaatatagtgagattgaattaaggtttatgtcattctatatttgggccaaataaccattcaaaaataatttctttgtaagttttgggttaggctgaaggtacaagcttaactcataattttggaaatttgccatgtcattatttgagcttcctcggttctccttgtgtctattaatacaatagtctatatcattctagcagtggctgtatttaaataatacctaccaagttgactgacaagtaaataagtaaaaatatgtggcagcaatacggcattgaatagccagtaggaacacatgttttaactgtattgactgggtttttagctggagccacaacctctgtctagaacttcacaagtggcatctatgcaggaaagagtaaaatggaaaatttattatctctatttctcaagttcatttctttaactgattttaatttacctccaaaaaatctaatcgttggaaattatattaaatttccattaatttattaattgtatatttgataggaattcctaaacatttttttttctgatttcttatataataatgccctcctctccatggaagtaaaattaaaagttcattgagaataataagttgatttagctacttatttgacttttgaggtttgataacctaccttcatgttttctaaatttaaaaacatttgtaaattatgtaacacattaagtggactttgttttgaacaatgttgtatgcaagtattatacaggcattattgggtatcatacagtcattaccttttgacttataaatatgcatcattttctaccttatacacatgtaatgtttagtccttgtgtaatgcatgaagaagtttgagtcctagacactagctctaagttctagctctagtgtgtttatgactttgttaatgaaactattttcttaaatccaaagcaacctggttatgttcccaagttatacatttgtcatttagatgttagcaaaagcagcatctcccctagcattgccatagcctttcagggacatctcctctggtgtcaacctcagcttcccataaggatggggaacattggctttacagcaactttcagagactcagtcatgctttcagttatgtgaatagcattttcaaaaccaaaaactgccctgaagcctcagacacatttaacaaattttaagtaagagacaaaacctacagttttttttggtttccatatggtgtctgtttggaaccagttgatttccaatttgagataaatggcttcaaagaaagcatcaactatctctatgcacggagactcagaggaggccaggatgtgtcaggacctggctctaaagccctgtgtgcatgcaggtgagcatggtgatgtcaggggaccagagcaggcacttgtcaaggagagccctgaaggggcccagggccaggtaggtgcggcagcccaggtgggagcacagccaggcagaatatttgccttccctttgctggatctctactttaagtctctgttactggggagccacattctgaccttccccaagtcactgcccaacctcctagtgctgaagaaggtgaaccaccacccaattaatgaaggggctgcactgtcactctggttgacacctaaggacctctcagagcctaggggatctttattgccaatgattgtaataatcgctgggcttgaacacctgtaagcagttctctcagacaggggaaagtcatgttactgaaatcttcaacttgcggtgttcagctgctaacgatcccgggatgcttctcctgggagcagccctgcagtgtgtacatggagacgtgggtgctctcctgtggtttctcgtggtcacttggggcttttttcaaatcagaaaccaaccattggcagcacaatcaaatctgtacaaacgcccctttcttgcccagcggtggtggactgactgttccaattgagaatttaaccatatcagcttcttggctagcatgaggtcacatcaagagtcccccaagagtaataattattgcaaagctctgctatatttctgcatggtatttatcatattgagccaattttgactgtagatttgaaacgaaatagcagaaggaagcaatgacagctgatttcaaagtgccaaaataattcagccaacattggtcaatctgtggggaaaatcgtccttcagacctggtaaggaaatcctccagtgtgtaactggagggtgcgggcagctcaggctgacttgctgcatcctagtttgtccaacatccagatgaaaagtgacaggtcctgtatgtccatctgtgagcaggttgtctttgctactcccaaagttctggagatctaatttctgttcaaaaaaacttccctgagcagctgctgcatgtataaggggctcaggatactgaaaggaattgcacatggttcctggccttggagggctcaccattcagtgtgagattaagacccttcctcagctaaaatcagtgccctgcactcactgctggagcatggtatgtgcaggtctgcatgcaagcaagggggttgggggaaatgcatgtctgcaaagcccagttggaggacagaatcctgaaaaatgagctgctaggaggtgtaagctcacactgtggacacccacctccttctcggttctggatcttgggtgccatgtaaaaagaagtcattcctttaactctgtgttttgaaaatgtggtcagggccccggaagcacaatgtgctctgtttcctcacactggcaaacatgacaaaatgagtcattcacatttaggacatggaattcctgtgaatgtcgtttcaaatattactcagcctacgcactgaccagaacttattttttacagaatcattttgacaggaaaagtgtttatgatagttttgttgttgttgttgttgttttgttttttcatcacccaggctgcttcacacccagactggagtgcagtggcgccatctcggctcactgcaatttccacctcctgagttcaagcaattctcgtgcctcagcctccctagtagctgggattacaggaatacactacaacacccggctaatttttgtatttttagtagagacagggtttcaccatgttggccaggctggtctcaaactcctgacctcaagtgatccacccacctcggcctcccaaagtgctggaattacaggcatgaaccactgcgcccggcaagatttttcttttcttttttgagacagcgtcttgctttgtcgcccagtctggagtgcagtggtgtgatcatagctcactgcagcctctacctcctgggctcaagagatcttcctgcctcagcttctggtgtagctgggatcaccagcacacaccaccacacccagccacttttcttacgttttgtagagacagggtgtcaccagcccaggatggactttattatgagagatatttctcctcatgtgacactgcactctttgttctcagttccaagaacagtctgatttgcagatgtgtgggactttgagcaatcacgttgcctacagcggaaggtagactcacctgggatgcgggtgaggcatccccaccctggaccaaatgaatagcaatctccgcggggtgaggccctgacctgctcgttttttaaaaatcttcccaggtgatcctaattgagtgttgacaacaaccagcttccaccaaggccaggcactagattgacaggcatggctgtactgggtattgttttttaagtcctttggatgtggcctgcttgaaattaaattaatttattggcaaaagctctggacaaccttgcaaaggaagcaaggcagactgagggaaagctcagctcccggctggtctttgagtgctgcgtccgagtcaggattcactgcagctggcgggagtctctccccatctggcactcccccacccgctagtctctttcctccactaacctccatgtgttctcagggagctcaacattgcaccattaggccaggctaaaaataattagaaaaatagaccttctgcagaaactaatgaattgcaaagagaagaacaaatgaagtttatttctccagaattcataaagagcccccaccttactactcctaccctgtccacataaggagattctcctggagagcaggttcatcatctgcccccagagatataaccacactgtgatggggagagtagagaggacaaagagggtgccctcccaagctcaggccacttctccctaaggaaccctggcaactttctgagaggctggggcaccagcctgggctccctgggagagctaccaggccacacttggagatctgttgatagaatgagctcctcccatgggcactgggagctgccctgttcaggctccctggtgaccaggtgcttacggagggagtcacggtaattcccacccatccactcacaaagccacgggctctcccttgatgtccgaggacttacagaaaaccagaactcaaaaggcagatggcaagtggggcctgaagggttacattttcctgcatggggagcccagatgtccggatggctctcatgggcgcccattatccactgcccaacagcacgtttctgcctcccaggtgcgggatctgcgggccagacgctcttctctttggccacgttgttcttggctctctcctggggcaattagcgccaattgtgaggtggccttcctgattcacacgcttgccccctaaaaggaagaaaaagaacggaatgtgtttgctaattttgtaggcagagagcagctgtcagattctatggaagtttattgttatttcattcttggtaactttccctgaattttcagcttgtattgtctaagttctgagccaggagctggagcggagatacagctgtcagacctgtgtggcaggaaattcagaaagccggaaaataattttaaaatgcagcagttagaatcaagatgaattgtcaccttaatatgcagaaaatatgagtcaacaggccccaaatgactcccttttgaaaaatcacatcattagatcttaccaaaagtcacaaacaaaaccaaattcaattgtcactttctaatttactctgaaaaaaaaaaaaaaggaatgtgaaccatttaccagtgaatacccaaaaacagcttttactaagtgtgtaaagcagaaaaatactgcaagccacttcaggggccttggacacagctccttttttgctaaggagtgagtttatttagtccccagcaaactttgggatatatcctggagtttcccctttagcgtccaggaggaactggcgagtgtggaatgggaagcgattccctcttatggtaactcatctgcagcctctgatctgtccccctgaacaggtgtgtcctacgtgctgtagattttttccttctctcctccggtgtccccctctattactttcaaaacaagtgtgtgctaaattgtagcaatattaatcccccaacggctgcacctccacagcgagcaataggcagaggcaagaaatttcacctgaggtcagggatggaaaaaaaggtcccagcccaggtggccacatcccacccacccagaaggcaggcccagcaggccccacccgtccctgcccaggcaacaggcagtggctggcgtgacccaggtcccgctagagcccttccctgggatgcatagccagagactatgctgagaatttcaccacgctctatgggttattagcagaaattgcaaaatagtccagtcaccattgagcacaagtaggctgtacctgtgcgagctggactttgctcacagtccccagttccacttgaggagcagggtggtgaattcatcgtcctcatgccactgagctgaggcttgcccagtcttctcctggtttgctcccttctcccatgggttttcaaggcacatgcggccatgccaaccgctgtgaggcgtatccacattgccctcctcctgcccttttctctctcctccccttttctttcctgcactttctcactctcccttgcagccagaacccttgggttaccagtcattgctgcttctggggcttctccccctcccggtctaggaggctgcaccccgaggcctgcaccgcttgggatgagggtcttcaccacagaacccttttgccagcagcccctgaggctgtttctcaggcacctgattgcaagctgctggccacatctccttcatgcccactctgttcaatgggaggaaacttttcttcctcatagaacattgctgattaaaaagccaaaaaagaaaacaatagtgaacaaatagaattaagaggttcaaaaatggagtgatgacgtcctcctgtccaaggggattgtcgggtctcattgggagccccacgtctatctggctatgtgtggtggcctgtaatcccagcactttgggaggccaaggagggaggatcactcgagcttaggaattggagaccagcctgggcaacatagtgagatcctgtccctatggaacattttttaaaaggccgggcgtggtggcttatgcctgtaatcccagcactttggtaggccaaggcgggcagatcacctgaggttgggagttcgagaccagcctgaccaacatggacaaaccccatctctactaaaaatacaaaattagcctggcatggtggtgcatgcctgtaatcccagctacttggaaggctgaggaaggacaattgcttgaacccgggaggcggaggttggggtgagccgagatcgcaccattgcgctccagcctgggcaacaagagtgaaactccaactcaaaaaaaaaaattttaaaaattagctgagcgtggtcgtggtggcacatcctgtagttccagctactccggaggctgaggcaggaggattctttgcttgaactcgggagatcaagactgcagtgagtgatgatcttgccactgcactccagtctgggtgacagagcaagaccctgtctccaaaaacagaagaaaaagagagaaagagaaatagagtcagaataaagtatgtgtaggaggccaggctggcaggaactttgcagtcacactcagcagagaatactccagaaatgtgggctgttaatcatgttgggatttatatccctcctcaaatatttggaaaggctgccaggcaggaaaggagcaagtgaattttgtatgattcccaaaggagaattaggacccctgggtttaagtcgtggagatgcagatttgggctcagcataatgaggaatttttaaatcattacggcgatgcaaggagggaaaggggaggggacttggtgacccctcccatgggtgcccacagcaccctggggtctcctgcctcccattctgaattctttgaaacactctggttccattaggaactccttgaccttcgacccgtgggcatatgctgagggaataccacccctaggcccagaaaccagagatcctacctggccttttcgctttctgttctttaaagctgctccagataaagaggtgagggctccaaggctctctccctggagaccagagaaaccagaacggaaacaaagagcctttcacttgtttttacccacctgttcccagtgatgttgctgtggccttactgtgactcggaactcttctccctaatccctttctcccatgtcctggtgactttcatggaacatccttgtaaacactatttcatgtgctggcctcctccacagggcctcacacaccctgtcagcccgtggctgggctgggcttacatgtaagtgcagccctgtggtgcctgggcattgcatcctccacaaaagagccggtggaggagatggctggtggcagtcagaagcctgagaaaggcaaaaccaggaacccaggactgacagccagggcacctttgcttcatgttataagagtgtccttccatgcctggagctcctctgcacttaagaaatatgcaaattcatccaatgctgttaggattcagaagagttctccttggaaagcagagtcaaggctcactcatgggcgaattcccagccgcctccagcgttggagccctctgggcatctggtcctctctggccccagggaagtggagtctgaagtaggacccacaactcgatttgcaccaacagaagtcattttcttatgtcagccttcagcttccactttcctggtcacctttcttaggcttttctctgctgatgccacccctgactcatgcaattaccccagatgccacagggcttgtgggattctcacagtgcacaggttttcagggtgacctaccctgtgagtgcctccaagtggaagccaagttagtgctcagagcaacaggggcactgatgaaactgggaaaagcaccttggcaaggacggagcccgagctcagtaatgggaaggctgtccagccctgctgccggtatccaggaaggtaaactctttcctaggagacttcaaaatcagcataaatgtccagttatctgtagtgtcgcggttatacccatccaaccactgattcaacaaccagcctccagtggggaatgcgggtcttgttcttgcatgggttggaggctcctggtatctctaactgacatccaacaaccagtaactcaagtcactaagagggtagggtggggaggaatgccaggccagagctggtgtttgcattatgtgctatgcactcacaaaacattgttttagttttagagatactgaataattcttcccaaaaaactctgcattcggtgactatcctgttcctggtcctgagtttgatcacgtcgctgctgagctctgggtttaccttctacaacagcatcagcaacccttaccagacattcctggggccgacgggggtgtacacctggaacgggctcggtggtgagtggccctgtgagactcggtgctctgcagaaaactgcatcccgcttgtccccatgtctctgcctctcacacatgcatgaacatacacagtcacgtttacaccaaggaaactatgaggacctcccatgagctgagggctggggtttattttgtcaatccaaagtgtttatgaagcatctctggaaatagaattctgttttaaatgcactgctgaggaggcttataacaagccaggctttgcttttgagactctaacataagaagtcaaaatgcacaaaagtcaacaaaatattgaccgggctcctgccatgtgctgaactccaaactaggctctgtgtggcatgtagaagcacacacatgtgcacacacatacacatgcacacgcatgcacacacacatgtgcacacacacacacacacacatgaacacaccagcacacacttccttctctttcctcctccacatgacaagagtccacttggtctccacacatgacatctctgcatggtcgtgccacagagccacagataatggcacataagagaatctgggtgcaataccttttttgtgggctacctgtgagcctggggtgttgctgggtggtgttgcttggttattttgtttgtttcatgggtgtggtgctgggaggatggagcccagatgggaagcgggtcccagctttgactcacagtcttctggctttcactgggtttttccagggctctgcagctgcccatctgcccagagcagggctggggaagtacctatttgccctgcccagctgccttcagggccttttgctcccaccaggcagtcaggtttctcctgttctttccctctccaccatcaaaactggaccttgggaatgaagcctgtcctaaggaaatgatttctgaggtggcttcatgtaagctccaggtgacgcattttaacacaggcctgaaattttgaagcacaggaaggaggctctggatatcagacatgtcaggaagcctcggaggaggggctgagggcagcatcatcctgtccctccattgagtgtcatccttaccacgaggtaggcgcaggtggctgaaggaggccagcgtctccatgtcatggagtagaggtgtgctgaggaatatgaacaactggctctccagtagggaaaaacaaaaagagaaaaaagccctggtgattggaatcgtgtaaacacagccacatggccattttcaaactcccaatgtgagatcactgacgtggagttgagatgtacaaactggccccagcacagcacaggtaggacggtgagggatgctttttaaaatggaaaagcattaagccaggactacaggtggaccagagtcacattacatactcacacctcagctctaaggatttggggtcaggctagtttaaccacattcatatatgactggctctttctttctgtgcttttattatttgggggtaaaaacaaataaatcccccaatttaatgggcagccactatggacgaggcacaaaagtcctgtagaatgaatatcactgtttccctttcttatggcagagctgagtgtcagaggttaagggactttgttacacaatcagatatactcacctgaatgccagagtcccttgcctaagctacttgtatgatgatggttcaccccagtcaatcaaaccaaggtaaaccaattggtacttatggccagggtaaagagatagattatttttacttttgctcatgcaactaagaaagtacgagaagcagtggcttcagacacagctcgagtcaaggtctcggcctgtgtcgtgaggactgtttcctgccattgctccatctattgaaatcctcagcgttgactccatcattcattaattggccagatcaatcctcttgaagataagatgactgctggccactctgggctcattgctgatggtggcagccccaggagaaaaaaatttctcatttcctccaaattcagagaaagtcctgggctactttgcactggcattgcccttctcccatcccttgaccaatctctgtggctggcagggttgaattccccaagccatccactaatgggccaaggctacctgcccatcctggagctggggctggaatcggcccttccccagccgcaggggtgagtggggaaggaagcctgcattcctggagggaaaacaggcgccaggaccagagtagagggccaggtgtggcgccggccgaacaacagggacccagcattgctgtgtctacagcctgcagggttcaaagtccactgcctttgccactaggctgtggctccatatctctgctcctccgcagcagagtatgggctggctttgcatatagcagaggcctcatgcatgtttgtgaaggaaaacatgagaaacagggacctgagagcctccccgtagccctgcctactcctatccacaaagaattgttggacggagagggaattcctgccaccttcctttcctggctcaggagcaagttctaacacacagagggaggctgtgaggtgggcagaaaacaacctgagaggttgatgtgtaaggagcagattgcattctgatgcctgcctgggagaaggcctcagcacagcttagcttcctctaaatgccccttgaggcctcttgaccctaacagtgttgataggcctgacttttgcccaaagtagccctttgggggttcctgattttctcacaggagctttgagggttggagaacttactgaaactctcagtttccaggaggctcagcctgcagaagggcttgtatacagagatgtcttaattcttgccttgggtcatggctgtgggacagcatgatcagactgacttctgggagtcctggggccagaaggaagtgctccaaactcctagcggctggttttgaactacctctgcttggccagcagatgttgggtagggaaggaagtgggtttcctggcttgtttctgacagaaagaagcaggttctgctttgaggagacaaacagcagtctcacttcctaggttcccgtgacctctgacctcagcctaccttctacaccacactgacctgatgaggctgtatcctggcctcaggggataaaattgtcccctgagagaagcttggagccagagacaactttgcagactgcctgttccaaatacatttgtgtctcatctgaggaactcagagagtggaaagtgatcaggaggtcacagggcccgatggtcacaggccaggacagaagccagggtccgtgagccttccgaagctcctcatctaccccggggcttcctccagcccctataaatccttctgtcccagaggctggagaagcctggcaggtagaggctctgggcatctcatcactaaaggggactcaggtttgcattttgtgtctgtgtgtcggcccctccccattcaaatcaaagttctaggcagcccgctctggaaaaaagcatttagactatatacatcctgcccctttatgattaagcttttataagaaacttcacaagaggaaaatgaaagataattaaggctgtgaggcacctggagagcttcagagggtcagggcttttgtacggacaaattattaagaaataaaaccattacattgaggatgaagatctgtcatcaaggagtgtttaaaacattctcctcatacaaaacccctctaattaaggccttttgatggaccgtttggaaagtttccctgggtgtgggttatagcaggatacatttgatgtccactgagttccgggtacatggcggcagacggagtctcaaagggcttccgtggccaggatcccctggcggcccccgtgcgtatcagacctcactgggtgagcctgctcaccggcctcatcacagatcctggaacataggcatccttatcctccaaaacctttcttttaacagctttattgacacatgagtcacacaccatacaattcacccattaaagtatacaattccatggttttttgtatgttctcagacatgggcaaggcttaccactgccaattttagaatattttgatcaccttgaaaagaaaccccatgccctttagctatcaccccctcccagcccacttccagcactaggcaaccgcgaaagccctaatctacatttttttttttgtctctatctcattccctttgaaagatgaggaatgaggctcagaaaggctacatgacttgttcaagttcatctagctgggatttccaatcctgttctctctgactccagaactacgttcttttaactagacaaaagtggctctcccaagtctatactgaagaatgttctttagggctcggcagagtagctcacactcggcacttttggaggccgaggcaggtggatcacttgagtccaggagttcgagactagcctgggcaacatagaaaaagccggtctccataaaaaattagtcaagcatggtggcatatacctgtagtctcagctagtcaggaggctgaggtggtaggatcaatggagcctgggaggtggaggttcagtaagctgagattgtaccactgcacttcagagcccaggggagagtgagaccccatctcaaaacaaacaaaaaagaatgttttctagtggaggatattgtgaagaataaaaaagggaagacataaacatgcaataagttctcttctctaatgagttttgtaaggagattcctcctgattagacacttgccagtggcatcatatgccatgagattcaagctcctgggatggcatttgtggctctcagggcagcccagtctccgtacccagttcttaggaccctgggacctctccccagcagctgagcttgtatctcacagtcccaggtgctccaggcccactgcccacccagggtctttttaaggcggcttcttccatctgtgatgccctgtccttcctcagctcttcccagacctccttatacagcttctctctgaactgtcctagtcaatcattcattcagcacactactgcattcaccacctaggaagtgcgctgtttggtagacaagttacacaactgcttctgaaagcgtttgagtcagcacattcactattggtcatacacagccctgcacaatctttagtgttctatgcctagacatctagtttgtgtcttacaattttgtaccttctccctagtgcttaaaagagtgtaaactcctgtgtagatatgcaatacattcccatatatatgtgttccataaagataagtgacattaaaaactgtatcaccatgccatgcatgaaactccatcttcctttcagcatccttcgtttttgtgaccatgatactgtttgtggcgaacacgcagtccaaccaactctccgaagagttgttccaaatgctttacccggcaaccaccagtaaaggaacgacccacagttacggatactcgttctggctcatactgctcgtcattcttctaaatatagtcactgtaaccatcatcattttctaccagaaggccagataccagcggaagcaggagcagagaaagccaatggaatatgctccaagggacggaattttattctgaattctctttcatctcattttggcgttgcatctattgtacatcagccctgagtagtaactggttagcttctctggacaattcagcatggtaacgtgactgtcatctgtgacagcatttgtgtttcatgacactgtgttcttcattgatgctgtactcctgaaaatttttcccacaaggttggggaaatgaatgggaaatgtcgctggtctgtgtggtattcaaagcagtagtatcatgatgagcgtaacgacccttctgacctggtctcacgatctgaaataataaaaggctgtgtcatgtttcttttc

SEQ ID NO: 723 - DNA, 14653 bp, Homo sapiens
acacaggttggagcagagaaagaggaaacatagaggtgccaaaggaacaaagtaagtccattgatacgttcttgcctatctctcctccaaatcaatgggcacaaactgtggctggtctacctgtgtgggttctgttctctagattggagggatgaagacaagttcttgactctatgttgaggccagttgaaaaatgagggagaataaaaccatgaacgaaacaagaaagaaacaaaacagaagaggaatgaaaaagtaagttggttgctgtacaagagataaaacggactgcaaaaagaaaaaaaaagctaatgctcgctgggtgcggtggctcacacctgtaaacccagctctttgggaggccgaggcaggagaatcacctgaggtcaggagttcgagaccagcctgcctaacatggtgaaaccccatctccactaaaaatacaaaaattagctgggcgtagtggcaggtgcctgtaatcccagctactcggggggctgaggcaggagaatcacgtgaactcgggaggcggaggttgcagtgagccgagatcgctccattgcactccagcctgggtgacaagagtgaaactccatcttaaaaaaaaaaaaaaaaaaagctaatgctaagaaaggtgaataataggttcaactgtatgccattccatgaacatgggcccaaaaggacgaggccatgccccactgggcacttgatgattatgtggctaccacagggacaacatagaacacagaagtaatactggagcccttggctttgtaacacattttaattaaggtacttctttctgacaagaaaacaattaaaattaaaataggtagggaaagaacattcattttcaccagatcagcattttgtgaaaggtgatataagtgtatacctgtggatgtactgggtgattttgtgaaaatgattcggtttcatgttttgctttatgctataaagtactcttgaaaataataatcatcttcactctgtcaaaagtgaagttagcatgaaaatgaggtagaaagaaactataaagaagtaaatttttcccatttttatttgaaataatgtaatcacagagcaaattgctgaggttttctctaattgctttagtcttatacttttgatctcatcagagctccaatatttttatgtgttccttgttcttaaaaataattgcagttgttctaattcttatttttaaaaaaaggacaactaggggtaaatattttgtcaactgtcaagagaacaatcctactaagtcaataggtggaatctataaaaggagtctatttattagtttcccttctcatgtatcatttacagaattgtcttcatttcaattgaataattaaagaatcagaactggctggctctgtctttaattccttttataaaaccagaacttgacccagtaaaaatgtattctgagtcctaataactatagacctagccatgaataatctgggttctatgtgaaatttacagatcttagtccagaaactaaacagcagatatgaaaggagaaactgttgataaataaatgaaaagtattgagttttcctcataaaatttctcgagacaaaaaaaaagcaatgatcaacagcaaaggagaatgtaatgaaatcatatacatgcagaaacgtggacaattctttaattgtatgctttttaaaagctcaaaaaaattcttgttctggttaattactgtactctgagtacccatctcctatttctttgctcttgaaattgaccctgttcaattccttttataaacttttcctatggccacatccactgcctaaaacaagatagaataccttgggatctaataataaaataatagttcctttttaagctcttgccatgtgctaggcactgttccaacagttttgcataaattaggataatttgaactttagactagcctccttaggtaccttctgtcattttacagttgagacataggaactaacagggatttcattaagaaacttgcttaaagtcccagacttagtgaagtagcagattgaagattagaaaagagggcttgagcaatatttggccaccgaaaccagatccataggatgtataacctcacattctcaaatgctattgagagttacgtggtgttactccaagagtcacagctatggacttgtttcctttttccttgtttaaaataaacttttgtgggctcaaatgtgtttacattttttttttttttgagatggagtctcgctctgtcacccaggttggagtgcagtggcacgatctcggctcactgcaagctccacctcccgggttcacaccattctcctgcctcagcctcccatgtagctgggactacaggcgaccaccactacacccggctaattttttttttttttttgtatttttagtagagacggggtttcaccatgttagccaggatggtctcgatctcctgacctcgggatctgcccgcctcggcctcctaaagtgctggatgtgtttccattttgaaaaaaaaaattcctctgtaatcagatatttcagaaagatgttttctcccttttcattgagttttcaaccattttcagttgcatctagtatcggagggtaagggttatgagtacaggttctggattaaattctctcattgtgaaatggggattttagtagagtacctatctcatggggttctgtaaagggtacagagataatgtatctcatgcacttaacatagaaataataatagagccaaccctgtaatcggcacaattccacatactttgcagagaataactctttaatactcaaactgactctctaaggaaggtagtcttattagctctattttacagacagaaaacaaaggcaaagagaggttaacaaacttgccaaagacacaaagttggagttagatcccaagttcatgttcctaaacatgacactatacagaccctactgtgcctataataagtctttaataaatgttagctctctatacacctcacctaaagcttgctaaagagaatccttactaactcactcaatcacaaagaagttaatccggtttataaactcctctccatggcatcagaagacagaagttttgttgttgggtagttgcaggagcagagtcaataccctgtcaccaaggctggcctggaaaacaagctgcaaatgtccagagtgatgctgcatggagggggattctgaaccaacagccaagaatcccattttcaagtcctaactctgccacatgttttctgtgtaaccttgagcatgtcacttaacgactcagcttcaatttctcatctgtaaatcaaggggaatgagacaggataaatggaaagggtcttttctaccctaaaatttctggattctatgagcacagggtctgcatatgtgtccttgttagataccagtgatacattgtaccaataggttattcatagtattcatacttcataccaagaatgagacattcatcactctaactttcttgatattcataagcacaagaaaattgttgtgcttttgaagacctcaaaaaaaggaatctaaggctaaagacaaattttttaagtgtcataatttttttcaagaattaatagtcattgttgtccatattcagttgtactggcttatttccaacaaaatttcccttgcctacatggggcctgagatgctctaagctttcagaaggacagaaatgaataaaagcatttttcctaaagaacagaagaatcatcttaagtgggcatatgtgaactatctagtttcccaattactggcaaacaattttaatcttggactgccctccttgccatacaagtattgtattacttggcccctgtattagttttctatttgttgatataacaaactaccacaaatgtagtggcttaaaacaatataatttttttatctgacagttctgtaggtcagaattccaataccagctcactagactaagttcaaggtgtcagcagagtcatgttccttcctggagactctagggaagaatctgtttccttgtttcatccagcttctagaggcgacccatacaccttggttcatggacgccttcctccaacttcacagttggcagcatagcatctctctaatgagggatggtttcaggatgaaactattccacctcaggtcatcaggaattagagtctcataaggagcatgcaacctagatccccaacatgtgcagttcacagtagggttcatgctgctatgagaatccaatgccatgctggtctgataggaggcagagctcaggcagtaatgcttgcctgctgcttacctcatgtagtgcagccaggtttccaacagaccacagacaggtaccagtccttggcgtgggggttggggacttatgagaatcatgtttctatcagttgttatggcccattatctgctcacttgttctctccatttgcatagataattgacatttgacatttggtaagattttctttagtttcttttctggataaacgtatcacttttgtatgttttgtgatacttaggacataatgatgtcatccaagccaacaagccatgctgaagtaaatgaaaccatacccaacccttacccaccaagcagctttatggctcctggatttcaacagcctctgggttcaatcaacttagaaaaccaagctcagggtgctcagcgtgctcagccctacggcatcacatctccgggaatctttgctagcagtcaaccgggtcaaggaaatatacaaatgataaatccaagtgtgggaacagcagtaatgaactttaaagaagaagcaaaggcactaggggtaagtctatttactaccagaattttaatttcacatttgcaaggtcttcttataagttataggagagtatcatccaattgctaaaaagttctgaacgttattctgaaattatctcttttagacagaaatatttagtctgcctatagactttcccttgagttcatttcattttagatcaagcaaaaatataacaagacacagaggagcctccctagctggagaatttggtaatattgacgtgacagaagcactgttacatctagcttgatctcatttcttcaaaggactttttggacaatctcaatcccatctctggattagttacaagtctggtttttgcataaaggtgaatttacataacaatgaacaatgatggctgcccccagaaaaggaaactacaaatgggcagtctgggaaaggctgagtgtgaaagaattgggggacattccatctgctatgcctctttcaccaatacccttagagatgctacagtttaactgtcaccttacttctacaaaggagactctgaactgactgccttgtttctgtaggcattgtaaaaacaaaaatgccctacttgtaagaaaattccacctgcctaggtagaattgttagtcccttctccgtgctttccaaatacatcattcatcccgctagcacaattccaccaaattatattaagtctctccctgtgaatagctcaaaatgctctgctggagcattccgtaaatgaatgctcattatgtgccagaaactcttctagccatcttactatgtatttcaagttgtgatgttttagggaagtaaaaatgagcataagttctcctgcagcagcctatttactaagctgtggaggtggcccttctgatcctcctcctcccagatagaggaaattccctgctcctaataagccaatgggacaaactaacaccccatacagccagccccacacaggtgcttggaatatcattaagcacaaaggaggtgcaatctctgccctcacagaacttacgccctagagggggaaatcagactgtatacataataaggaagtaaagtacttagtgtgttagaaggtgtcgaatgatatagacaaaacaaagaagtgtaaaagggctaaaaagtactaggcagtgaggaggcagcaatttcaaggtggtcagaatgggctttccttagaacatgacatttgagcaaaaacctgaagttaggagtgagccctgcagatattagggaaagagaaaacaaccagtgtaaaagtctttagatgaaaatgtctttgaggtatttgaagaaccgggaggaggccaataaaatagaacagaatgagtgagggagggggcagttgtcaggagggcagatgagtggcagaggccacaggtggtgaggcctgcagagcagaaggctttggctttgactgggtggatgaggaaccactgaagcatgctgcccggcaccgaagaggcgtgtgataaaaatactttaaaagaatgtgaagttttgttttcaaaatctccagttggcagaagctacttcctctctctgaagatttgttatttctatgccatcagcaggccctgggcatcatgacagtgcaggggccacaggtggcaggacttggcacacctgtaccagtcaactcagaccttaaagtgcttctgtggccaaaaatgcagacaaattgtatgtccaaatttttaagtctgtcctataggcaattttgatcagtagatggtacagccagggctgtaggaggagaaatgagggccagtacaaatccagatctaactgcccctcatcaaggtgacagcaaggatgagaatgggaagtttgtgaccagacggctgaattgctgctctaaagaacagttgtaaaaaccaaatataaagtctaatacaggagttctttaagtgagataggctaaacgtggcccatcatctctctgaagctataagcaaaagtatggtatgtgtgtgtatgaatgtgcaagaataatttttcagggagaaaggttcatggtttttattgatgtctcaagaaacttttagcattgtttatgaaactgggtttttttctaattttaattcgatttacttgtgttcagtagctatttattgaagaaataaatacagcagtctttgtatttgcagtctccctggatagataagatgtaaccatggggaaaaataaattacaaatctacaatcaagttttggaccaatctagaaatgattattcctcagaaatctatctttatttacaatgaaggaaggttcaataagaggtacaaggaggtaaaagatgtataccttacttttagtaatatatgattgataagaagaatgattggtaagaaaatgattgcatacctgcaactttttaaaaaaggacaatatacactttgggaggccaaggcgggcagatcaagaggtcagaagatccagaccttcctggctaacccgtgaaaccccgtctctactaaaaatacaaaaagaaattagccaggcatggtggcgggagcctgtagtcctagctactcgggagggtgaggcaggagaatggtgtgaacccgggaggcggagcttgcagtgagccgagatcatgccactgcactccagcctgggcaatagagcaagactctgtctcaaaaaaaaaccaaaaaaaaacaaaaaaaaaaacaatataaatgaatccaaaatcaagtaataaggtgtgttttatgtcatgagatgcaactgaaattcagaaagaaagaaaaaagattaatttggtgtaatcaagaagacttcatggaaaaggtagagcagagctgagcatgggggaagacagtaccgaataattcagacaggctcagcagtcaatgtgctgcagtaaattcccagatctgcctcttaggaattgtgtgaccttggatacctgatatctttatgtctctgggactcaatccagttgtaggaggattacatgaaacaataaatgtaaagtgttcagaacatgaccaagcacataattcatgcctaataaatggttttatcttcaccaattcctttacccgtaactgggatgacccaagcagagaactgatccatctgaaaaagcagctactgacatcacagttaaagtattgtttttctaatagtcttttagaggccctcagagatgctaatgcatgattaagcagctgtactttctgaagaattcttcttgggccaccccagtaaattctccaaatacctcaaaacagggcgtttcactaagggccttgcactccagttattctagtatatgtcagaatcttcatgacccacctcctgcttcagatgtgtgcctgaatgacaacgatggatctcagcaaaattgacaataaataagcaggggcagcaatgacagtaatgtttcacacgtctgaaagtgaagaagtaattttaaatggctgttttcttttttcaggtgatccagatcatggttggattgatgcacattggttttggaattgttttgtgtttaatatccttctcttttagagaagtattaggttttgcctctactgctgttattggtggatacccattctggggtggcctttctgtgagtagattgctagaacaccagtccttcttggtttataaagtattccctcttggtttataaagtattgctatctccagccaattcacaactcatttcttgataaagccctacatctgagggctggagaatttagaaaaattaacagctctgaatgagggctggagaatttagaaaaattaacagctctgaatgagcatgaaaaaatcgggaactctttcgccattttacctaggagcttattccattctttaaaatttaatcatgtaatcagcaagccaaagttttgatatcctactacatttgagatggaaatgtatgtattgggtggagagagaaagaaaagaaaaggtgattggaaacatgattaaaaatatgcaagtaagccaggcatagtggtgtgtgattgtagtcccagctacttgggaggctgaggccagggaattgcttgagttcaagagatggaggccagcctgggcaatatagtgagactcaatctctaaaaaaattttttaattaaaaaaatgcaattgattatgagaagggatggagcagtaagcctcagaacaaggaatgcttaaacattgtgagttcttcataggccagaaattaaggaaaagaaaataaaaaagaagtcaaggacatatgactgagagttactccagaaaattcagaagtgcgagagaaaattttgagaaggaaactagatgaacataaatagaccaacctttcatataaagagaaattcccaagcacaaccagttaacccatttcacaaataaatttgtccatttccacagtttattatctctggctctctctctgtgtcagcatccaaggagctttcccgttgtctggtaagttagactgtctctactttttgaacccctttaaagattagcttaacatattggggaggaaaattgaaaagctggatttgggaaatgcaaaagggagcacctttcccaaaaaaaatctattggttgccttatggtctgagcgctggggtgagaaaatggtccacacagtttgccactaagaaatggcagagctccatatcctgactcttgaattcacaaaggtgagaagtagtaaaaatcagggttgtttaagctttaacctaaaagctccctggttcagtctggtcacactctattatgggaagtccaaaggagaatccaggagccaggaaatacatactagacacatcagttaccaagtctctactgttcatttgccacttctcagctctgtcttgtatttttatttttttatttgtgctatttcctactcttacacaggttgtgtgttttacaattctttaaattgccattaaatgagtctagcttgttctgtaagaagagtttataaaaatgatgagtaagacaggactttgagctctgtcggtcacagcaccccacctattccaatttcgtggtctactattgaaccaggaaaaagaaagtgatttatcaagaactagagtcaactagagcagaggtggtgtcaagattatatgtaatccagtacaagaaagaagaacggggaaagaggaacacagaatcatgtagctcatgctcttgcagacaaaagaagaataaaataattaaatcaaattaaaataaaataagcctaattctgattaaccactcctgttgcagtccaaaaacaaaataaagcaccctttctctgcatcttttaaggatccttccgtctaattgagattgtcgaagcatagattccacctcttagaggagacagccactgacacatacctaagacaatttttctaagagcttttagagaacttcaggaggctctaaggcacgctgcagcacaagcacattctaaagaactcgactgtgccacccctagcaagtcacctgcggacttggtttcacaattattcttctgcatgttaaaatcctattgtagaaactggggaaagttttgtagtcgcccatacacctctgcccacaaaagcctaaattttctccttctaaatttgggggttcatatttagtccccagagagacttagggttttcattaattcctaaatttttcagcaaacatgttgtgtctaaatactttcccatctataaaatcatatgctatcgtactacctcattcaaaggctgtaagagttgagataatttaaataatttaacacagtgtctgacacagaaaaatgctcattagaagtttgttttttcatttttttataaagaaaatatagttgttattgtgcatgaagcttttagtaaaatccaatagatgagtgcctgctttatatgatttacatttttctacagctttttagaagtaccctacatctaggctgcatacagaataatgtttatggtaattacccagaagggcagaaaacagaataatttcaacttgaaaaattgttttgaaagttcaaaaattaagaaccatgaaatttgattgattcttatctcacttaacttcagtgatcctgtatataattgattttttcctgccatctccattaggtgaaaggcagcctgggaatgaacattgttagttctatcttggccttcattggagtgattctgctgctggtggatatgtgcatcaatggggtagctggccaagactactgggccgtggtaagtatcccatactccaccatgtgcctgctctattttcagtcccgtaaagtgggtctatgttttatttcttaataccgtataccagctctagtggaaaatgttttttctattctagccccacccctagtcatatgatctctaggactatagaataaagtgagagggttacctctacagatagaccgaggcttaaaggacatcctttattggcccatctcactgttaatcacatgaacaatggggaagggtttggataggcctccatggcttctaaaattgtccaaaaattattttcccaacatttgaaattctatataaataaggtagtcaagctattgagtgttttttgttaaacttcagagtaaagtatgaagtgagagggaaatgacagggataagaacatctgatttttacagagaaacccaaggaatgaagcaattgcaaaatgaagcacgtatctctgaatgtgctcaaaacacaatcacacattcattagccttatatagccaagcatggactctgaccttaagaggaaatgggtggcccaagggcaggaatgcttaccatctataaggaatggagcaacatggtataaaatgaggttgggctggaagctgtcatcctacctcaatggccacattaaccattttggtcttcattctgtgagcaatggaaaaccacagaagagtggttttattggtttcattttattttatgttggggttggttttgcttttgcttttcagtttacaaaaagcagagtttattaaattactgtgggctacatatatcttaagaaagacacagaatgacttccttatctatctagaacatattaacattaagacaatatcacaatattttgaacaaataaccacaataacatttcctttatcagttcactcaatactgtgtaagtaattctatttcactggatctcggagtggcaggcttatgaagccatctgcttctcaactaaagggttctgaaatcctgactccaaccattggtataatctgaaagttgtctaggcactcccatcagatgcgtgtcccctagagtatgttctttgaagtgtcagtagtttgaattgctggcacactctttttccaccaagctctgagacaatcctttgttaaaaacataggagagttttaggccgggaatttgaatgatcacttttgtgcttggaaaggacaacactgtttgcagtgtaaggaaaagcttatataagaaggtgtattagtttgttttcacactgctgataaagaaataccaaagactgagaagaaaaaggggtttaatgagcttacagttccacatggctggggaggcctcacaatcatggcagaaggcaaggaggagcaagtcacatcttatatggatgggggcaggcaaaaaaaatagagcttgtgcagggcaactcctgttttttaaaaccatcagatctcatgagacccattcactgtcacaagaacagcatgggaaagacccaccccataattcaatcatctcccaccaggttcctcccacaacaagtgggaattatgggagctacaagatgagatttgggtggggacacagagccaaaccgtatcaggaggcaaaaatagatgagaaagcttctcggtaaataaggcagagtgaagcaagaacaaaattcaccctccaaaataccaaacaaaagaacaaaaactattcaaaaaaaaacagctttcaaactggcatccaagtagagaaacaaatcattctgatgctactcaaagctgaaaaaaagcacagcttttagacctggctcttgtttccctacaaacaaaactgaggaaagaagggaagccaaaaaaaaatactgagaagtctcactaacactctccagtctgtagctgagaaggctggggtggagagcagtcaattctgtgaaaggataaagcaaatcctgtatggtacaagaccatgagtagtacccaggacctcaggagacagaagaaagggcaacaccttcccataccctgcatggtaccctactaccagcagggaatgagcagaaatgcacaggaatgcacaggaataaacctccagccaaggagcaggcctccatactaagcatttagcaggctctcagaagacagaaaaagtgaagtccatcctcgctagcaagaactgtgctcgaagccagctaagctatctctctccctgcaacagctatatatgttcacattcagaaacatggatataaaacaaccgctagggctcaagttgtaatggaagcaaggaagacaaatgggagccaaataaacagaagtgtcaatgaaggaaaattcacctacactgtacctgatcaaatagaaagcctgtatagagttcaagtgagcttaatacttttatttaaaatagaaataacatgattccattcttatagaatgatgctcctctctcttggttattctcttttttccctctcacggcatctttccacacatccattcttctgccttttccctgtacacagagagctaggataatagtcatcaaacattaattttggttatttctaaacactggcatttggaatgatccgttggtttctgtattgcttgacttttttaatgagtagtaacatttgtattaaaaaaaacaacgaggccatcacaaaggaaaaaaactaccttctttctaatatttctaaacaaaatagcctacttaccaaaaggaaagacttctggcattttaaagaaaatccaaaataaattcacactcctctggaacaagcatttgatgatactggaagaataagcatggagcgagttgagtataagcaatagcacatttgatgagtcaataactttttgaagcccacgtgaggccctcctgattagccaaaatttcactatttatttatgatttcagctttctggaaaaggcatttcagccacgctgatgatcttctccctcttggagttcttcgtagcttgtgccacagcccattttgccaaccaagcaaacaccacaaccaatatggtgagttgggtctcttctttgtaaaataatctgaaaatgccctggagaaatacagacttgtgtctgctaaatcctactatcggcttaccagaatgctctttgtccttcactctgatggtaccaggggaaattgcataggattgtagtaaccatattgcttgtttttattcattctttccagtctgtcctggttattccaaatatgtatgaaagcaaccctgtgacaccagcgtcttcttcagctcctcccagatgcaacaactactcagctaatgcccctaaatagtaaaagaaaaaggggtatcagtctaatctcatggagaaaaactacttgcaaaaacttcttaagaagatgtcttttattgtctacaatgatttctagtctttaaaaactgtgtttgagatttgtttttaggttggtcgctaatgatggctgtatctcccttcactgtctcttcctacattaccactactacatgctggcaaaggtgaaggatcagaggactgaaaaatgattctgcaactctcttaaagttagaaatgtttctgttcatattactttttccttaataaaatgtcattagaaacaaaa

SEQ ID NO: 724 - DNA, 83072 bp, Homo sapiens
tttatagcagcagtagaaatataccaccctagaggacacacctccttttagctaggtacctataaatgtccaggattttctattcaattgagaagaacccagcaaaatggggatctccacagtcatccttgaaatgtgtcttttatggggacaagttctatctacaggtattacgtttaattattatattcattaatttctctcctgcagacccaatcatggcaaattatatctactactttccattacaagggaagttttatatcaaagagtgggtagcactttgctgataattgtaattgtttgcaggtattcaggaggaatggctcttttttgttttatttctggctgagaaatataaatggttgtagttagaaaaagccagtcattaagtcaatgttttcagtaagtcattcaactaaaggaatgattgatttgtcttagaaaaatccctgaagtttaggaaaggtggatgtgtattattaagaggcccttaaactttgcaacaattggttaaacacacaatttgtgtgctatgaaaacgggcagaaaggattcccactgcaaatgccctttatgtggcttctttctacaggtgtgtctggcttgatggctaatatttgccgagcaaaatcaggtcaagtaattgagcgcagacaagatcattaagattccaagtttgtcttggaattccaagtttctctgtcatgcacagctttaaacaaacacttgaagcccagtcactcaagcatagctgtatgttcttagagagtcagatgataaacgtgagagagccgtcggtagcgcactctgattgctgcatctcaatggcattttgcagagatactagaggaacaagtgattctcagtttgcctattttgtctctctcttcctgtctctctgcctctctctctctctctttctctcttatctattgtgtagttattatcatcttttctctcccctctctctccctctgtttctgtctgtctgtctgtgtttctctctctctctgtatctttctctttttcccatcttttgggcagatatcaccttttcttcctcctcctccctctgtttctgcctctgcctttctctccctgcccccctcactgtatcttcctgtctttctcatctatcaggcagttattacctttcctccctccctcctcctccttctctgtttctctctccatctctctttctctttattgggcagctattatcacctttctctctgtctctgtctctctttctcttcaactattgggcaactattatcacctttcctctctctctctatctgtttctcttcatctgtcaggcagctattatcaccttccctccccctctctttttctctctcactctttctcatcatctattgggcagctcttatcacttttcctccctatttctctctctctctctccctttgtttctatcttctttctaccttccttccatccctttttctttctctccctctctttattcatttctttcttccttcttctcttttatctttcctactgccttttttttcttttatgtcatcttttgctagatttatgaatttcaggatacagggtaaaaatcacctaattttcaggtaacttctggaactgtcactctccccctaggctcagtgggggaagctttgaagattaaggttcatctggttggttgctttcatgaaagcagcacccccaaacccagccctcccacccaggtggtagggagcaggcccaccccctgtgatgagtgtgtggagggactgggggccaccaggcccaggacctcaggggagtggagactgggcatcctcatcctgcctccatcagaagcatctgaaactgggaggctgcgtcctcagccccagctcttgtcagtaccgagttcaccctccagattgtctctgaaccatgacatggaattcacatcagccactgtagacagggagtgaattgcctcgtctttatctacaaagaaacaacaggcagcagtgctcttggattgaggacatttgtagtttgcccatgatgttatgtgcatgcatatggacagacatgcacacatgtgcatgcatgcctgtgtttgccattcagaggtgggaattcatgctctctgaagtggacctgtattctcttatttaaatcttctaacattgctgaagttaggaacaattatttccacatttcagatggggaaactgaggctcagaaaggttattggcttgtccaaagacagcactggtgagtggctgggttagggcttgaatctggatcaaattcactagcattcagatgacagctctggcccactggcccttgctgctccttgcagggaactgaggtgatgaactgaactgtggcatctaactcagtgcttggagcctgaccacagagctttgcgctggaagtaccgaggtggcaggcacctgtcagctctggtcttcatgcaaactcttgagaaaaactcagtatgcccaggtttgtgctgggcaggaaaggctgtggtacccactgctagccccagcaatgcccctcctctgccacttgcctgctgtggatcctctgtgaccctcagtttactcatttataaatggaggttatgttccaacccatgcagtatctggcacatagacagagcctcagaaccatttagtgttactactctagacattttcctcatgttttatccaaaagcagcttcctaaaagtaatgtgagctcttggattggatcctgcaacagaaaatgaaaaactggtgaaatccagataaagcctggagtaaacttagtaggaaggtaccagtgtttgttagcatgagaatcacttgaactcaggaggcagaggttgccgtgagccgagattgtgccactgcactccagcctgggtgacagagtgagactctgtctcaaaaaaaaaaattaataaatcattttccagaagtgattcttctcccttcaggcaatttaccaccattcccacaatggcagctggagtaacctacagctatgtggttgattcttggaagactacagattggtctcagtatgtgcagaagggtctattcaaaatgtgtggacacagcagaaccaggaacaacttcaatgtggtgttccatgctgtggatgagccttgtcaaggctctggctggatgagttcgactgccatgggattaggcaggatacctgggacctggcagtgggaattgcatggtgtcaggtagactgtgtttaaatggccgagttttgaatggaaggctctcttaggcacatctatcagctcgttcttgagtgtgggagcagggatggcatgtcagaaaagaggtggggatgttctggtacagagttccctagtttgctatctctgttgaaagaatgttgtggtttctattgcgagtttcttcttcattttcagggatgcatagccacatggtttcagtggcccccttcctaagccatcaatatgaagcagggcagctgggggagcccatcatggagctcatattcaggctgttgaggcaggtgaagatgttctctgacatacggcaagtcctgtcactggcctgttggttccattagagaaattcaaatctctgaactgtgactgtcactgctctcaggacccacatttacaaagaatctgaagagccgggcatggtgacacatgcctgtagttccagctactctagggctggaggcaggaggctcgcttgaacccaggaatttgaatctagcctgggcaatagagcaagactctatctctaaaaataaaataataatctgataattttgtcaaatgccttaatcctccttttaccaggaagtaaaaagaaaaggaataatgaaagaaagtatgctggaattgttaataagaatttaaacatagcagacctttttgtatcacatacattttggtatataaacatcataaaagacaaaagaataccatcacatgtattttttttttttagcaaaataagatggttgaagttcttgttgcaaaatatcatgtgatgaaatccctatcgaagtgtgtaagagtactgtattttatttttgtccttagaattgtatcattgaccctggattcttgaatttgagaaattcatctaggatatcatcatctgaagactcatagtctgagatttctgttgtacaatcaattctaccattattagtatctggagtgctatatcttgtctctatattcctcttctggttcatctaattattgcagaaacatcttcccttgtcagttttcttctctttgccatcacaagtagaaaatgaaaaaatttgaatttttaactgcattcaatgaaagctaaaaacagactatgaagaaagtgtctccaatcttaaaaaaaatcttcttgaaagataatacaatactttgggcatggaagaattatgacttatttcactagttcatcttccttctaggcaacttcaccattctatcattttcttactatttaataattgatgaataatgatgcaatactttcttggatgatgaaatagtgaaatgcttcaagacataggaaaaataaaatcagaagccaataatgaatcttggatttataaaaggatctaatggatccatatggtgattacaagataggatgagttttatccttttttttaaatgaataaatactctctctgatctttgaaagacctctaaaatatataaaagttgttaaatatcaacactcacgagtatagttagaactgctcaaaaagaaactcaaaagctacagttgagtccgatggaccttgtctggcctcactgaatataaagatccagggatctctagatttccatttgcttcaagatggaataaaatgttttcaggttatgagtcagaaggaacagaatatctgacattaacatattttcttctttaggggtcatctgagtggctgttgtcaatgccagctatactcaaatttcagactggacaacgagcttaagctgtcttctcttgtccagcccttctttccaagcatagattacatcctgtcaccataagctgtagtgttaggggcctagtaaagagacatatgcttcattacatctaaaatgattgagctcctcatatccaatccacttgctttaatccgctattgcagaattcatttagcaagaacgtcggggacacacaaacccaagattgagccacagcgccctctggtgtgattgtacggtgaagctaaagccaatttctgtgacttgtaggaaatcatttctaaacagtgtttctaagacgaatttgtgttctttccaggtgggtggatcccaaggactacagactacggtaagaccttttcttcactcctcttccctggtggggttggccagttctcctctgctactgttggctagttgaggctgagcacagctgaggtcacagagcaaacgcctgccttgtcgaatgcaggaatgccggggggacaggagacgtgcgtgccaagacctggggcatgtctcaagtgcacactcggccaatcccagctgtcattctccttcctcttgctctctgactctcagtcatttatcagatgaggttagtttcagtttggtgtgaggagagatagttgaaaataaaggtcagtaccttttctttttttttctttttcttttttctttttgagatggagtcttgctctgtcaccagactggagtgcagtggtgcaatctcagctcactgcaacctccgcctcctgggttcaagcaattctcctgtctcagcctccagagtagctgggactacaggtgcgcaccaccacgcccagctaatttttgtatttttagtagagatggggtttcaccatgttggccaggatggtcttgatctcttgacctcgtgatccacccacctcggcctcccaaagtgctggggttacaggcatgagccactgcgcccggcctaccttttcttttcactaataatgacaggtatcttgaagataactaacatctaccaagcacttgttatataccctgcataaaatgattttcatgtatgaaatgaattgatatatttttaaaaaatacttaaaataccacctggcacctaataagtgctcaactaatgcacatagtgagtgctattatcatgaaatctttccaagaacactttgaggtaagtaatacgattatacccattttgcagatgggaaaaccagggcacagttagctaatttgtcaatatttctatgtctaagatcatgtgtctggtgagtagcagggcagagatttgaggctaggatgggtgcctcctcttacccctgccctggtctttgactttggctaaatgtccctgcctctccagtgagaatgtgcagagaactttgtgcccaagtttaatttttcagggccttccatgtgttcacttaggatgactctgctcctgggcccttggccttgttgaggtcagtccctccccttccaggacatgacttgagagatccagaaatggcctgggaaaggcagatttctgaccaacacagagcaagggagaggctgaggcagggagaccgagcactctcctggagggaccattcacagggtgaccaggagggggcgcattgccctgctgcacctctaggttcatctctgatccagaagagttgcagatggcatagaaggtagggtgttttgctcgtaagaggggcccttccgaataaggcctcaggtctgaacaggcatctccatggattatgtccctgagactggggaaggacagagcatgggaagtccagaatgtactttggggataccctgaagatggtccagctggcctttcctccctctgggaggaaaagcaacctgccccctccctttgcatcccattccagcctctcactctgtgaccacaagtttctcataatctcaaactcaccattgaaaagccacacccaggatctggctcctactgtcaggacggtgggctgcacccctcaggacctgtacctattttcctcacaccatcaatacagcttaccccagtgggtggtctagtggcatcacgtcgggcaggaacatggtgcttattgacttcccagcatggccagctccatggtgggaagcaggctcaattagcccctcccaggagaggaggctggaaaagtaggtcgaggcttgctcttggacttgatcctgatgggactggagagtgtactgaagcattttgagcaaggaattgaattgaatatatttgtactttctaaagataaaacttgaaaaccacctggagaccagtgaatcctcttagtatagaaatgggtgcagagtaagcactccatcgatgctgattgaatcaatgaatgtggatggactagagaaaggaagagcagacactgaggattcagctgggaggaggccaggttcaaggggatgaaggcttatcccagtgaaatggcagtgggaacgacacggaaggaatgaccttggtgatgttagatgtaggatgtgaggagaaggaggagtcgaatatgatgcccttattcccagcatggttaatatggagcatgatgacatccttaattcaaacggagggaagaggctgtgttgagtttgggatgatgtggggggtaggatggccaggaggccactgaaaatgctggtctagagctcagggctgggctgtcagggctgagtcagaaccagagaggtggatttgggggtcttctggaaagttctcagagtacatgaggttctccagggggaaaatacagaatgagaagagggcaaagagagaacatggaagaacaaggatacttaagatcctgctgggagaaagattgtaaataagcagggtggtgagaggaagaaggaggagtgaggagggtagggatgcaagtcaagggggccgagagcaccaagataaaagcttctggctgtgtcactgcaggtctgcctctgaggctggtgaatggaggtgaccggtgtcagggccgggtggaggtcctgtaccaaggctaatggggcactatgtgtgatgacagctgggacgcccaggatgcagatgttgtctgcaggcagctcggctgtggctattccatgtcagccctgggcggggcccactttggtcagggcttgggtaacattcccttgggtgacttgcattgcttgggaagggagtcctacctgtcaagctgtccccacagcggatggtacaaccacgaatgtggccacagggaagatgctggtgtcatgtgctcaggtagtgtggatatcaccttgctctgtgtatctgcaactctgagtcaatattaccacacataagtatgtgtgcgtacatatgtgtgtgctctacagcttacctgctttgcagtaagtcatgtcttaattgatattggagggcaggtggtactggcccttttcatagacaatgaaggtcaagggatcatcggccagtccttctaaagctggatatagtggaggcaggcttcagtctcaccccccagagcctgctgatgcaatcacctcatggagtggttttgatgagcagcatcacgaccacccccggcctgggataccaaatatatatcttcctaagtggcagtttctcctcctttaaaagctgacgaggatggaggaactgctggtccttaaaacataaatgtataccaacatcaaattgaggagtgaaccaaagcattctctttatttggaattaaatgacaaataaaagctacttaatatcctcaatggaaaagagaacttctcctggacccaacccagcaaatcccagtgttgatttcctttgtttgcgtagtgccaggaagtgtgtggacaccaaggggtcctttagttcccaaagaaaccttcaaggacactgtcccatggcgtgttccccaaagaggagtttgtggttagaatgttcacttctagagcaactctggcatttgccgtatggactggactgagcccatgccaccatgcatgggatgtacccttgataatccaaccagcaagtgggactggactccccaaggggacatggtcctccatgcagccactttgtgagtgatttatttcggcattctgaaaaggttggtattctttcgaaaccacctttctttctagttgaaccatcttatcaggagtatatcagtgatggtgaatgtttgtcatttgagggtgtgttttagctatagatacagccagttgtcattgacattggatcttgtgactaggatggggctatgagtggacttggtgattttttgaatacaggtcgtggcagcagaggaggtgtggggagggtaacaggagcaaaggatgctggtgtggcatcctagcccagcctggggccatttcagtgatggagcgattggcacatagttggcttttagcaatggagggtgcccttaggccctggcttccagttcttgcttgagagctgaggaagccagggaccagccctccccaagcaagggctaccatcaatgagctcttccttttccacctcgcagcttcactgattccctcggaggtgcccttggatccaactgtagcagaaggtaaggtctattatgggggaaccctgtgggctcattaccccactgcacccctaggttcatctctgatccagaagagatgcagaagccatacttctagcaactctggcattcagtgtttgggctgactgaacccaggctacaatgcctggggtgtgcccttgataatccaactaccaagtgagactgggctccccaagggggcatggtcctccatgcagccactttgtgatggtttagttttgcattctggaatggttggttttctttcaaaaccatctttctttcttgttgaaccaccttctcgggaatatttcagtgatggtgaatatttgtcatttgagggtgtgttttagctatagaaacagccagatatcttttgacattcaatcttgtgactaggatggggctgtgaatagactgtgtgacttgttgaatagaggctgtggcagcagaagaggttgggggagggtaagtagagcaaaggatgcttgtgcggcatcttagcccagcctggagccagtacggtaacacagtgattggcacatggttggcttttagcaatggaggttgcccttaggatctgtgtttccagcccttgcttcagagctgacgaagccatggaccaaccctccccaaacaagggctaccatcaatgagctcttcctttctccaccctgcaggttctccatttccctcggagtcgaccctggagtcaactgtagcagaaggtaacgtctactatgggggatccctgtgggctcattaccccactgcacccctaggttcatctctgattcagacgaggtgcagagggcatagaaggtagggtgctggtgtcatgttctcaggtagtgtggatatcaccttgctctgtgtatgtgcaactcagagtcaatatcaccacacatgagcacgtgtttgtacacgtgtgtgtgctctgcattttacttgctttgctgtaagtgatgtctgaattggtgtttggagggtaagtagtactgccccttttcatagacaatgaaggtcaagcggttatcttcctgtccttctgaagctggacgtggtggaggcaggcttcagtctcagcccctcagaatctgctgatggaatcaccttgtggactggttctgatgagcagcatcacgacaacccctgtcctggggtgccaaatatttatcttcctaagtggcagtttttccttttttaaaggctttggaggatgggggaactgctggttcttaagacataaaggtatcccaacatcaaattgaggagcgaaccaaggcattctctttactgggaattaaatgacaaataagatacttaacatcctcaatggaaaagagaacttctcctggacccaacccagcaaatccctgtgctgatttcctttgttcacatagtgccaggatgtgtgcagacaccaagagatttctttaattcatgaagaaacctgcaaggacactgtcccatggtgtgctccccaaagaggagtttctggtgaaactgtctacttctagagcaactctggcattcagtgtttgggctggactgaacccaggctaccatgcctggggtgtgcccttgataacccaatcaccaagtggaactgggctccccaagggggcatcgtcctccatgcagccacctttttgagtggtttagttttgcattctgaaatggttggttttctttggaaaccatctttcttgttgtaccaccttctcaggaatatttcagtgatggtgaatatttgtcatttgagggtgtgtttgagctatagaaacagccagatgtcatttgacgtccattcttgtgactaggatggggctgtgaatagactgtgtgacttgttgaatagaggctgtggcagcagaagaggttgggggagggtaaggagaacaaaggatgcttgtgcggcaccttggcccagcgtgggaccagtacagtgacagagtgattggcacatggttggcttttagcaatggaggttgcctttaggacctgtgtttccagcccttgcttcagacctgaggaagccatggaccaaccctcttcaagcaagggctaccatcaatgagctcttcctttctccaccctgcaggttctccgatttccttggagtcaaccctggagtcaaccgtagcagaaggtaacgtctactatgggggagctctatgggctcattacccctctgtactcctagattcatctctgacccagatgaggtgtagaggacatagaaagtagtgtgctggcgtcaggtgctcaggtagtgtggatatcaccttgtgctgtgtatgtgcaactctgagtccatatcaccacacacgagcacgtttgtacacgtgtgtgtgctctgtagtttacttgctttgctgtaagtgatgtcttcattgatgttggagtgtgagtggtaccaccccttttcatagacaatgaaggccaagggatcatctacatatcctgaagttggatgtggtggaggtaggcttcagtctcagcccctcagagcctgctgatgcaatcactttagcagcatcacgacctggcctgggataccaaatatatatcttcctaagtggcagtttctccctttttaaaatttgaggagagtgggagaactcttgggacttaagacataaatgtatatcaacatcaaattgaggagggaacccaggcattctctttactggaaattaagtgacaaataaaagatacttaacatgctcaatggaaaagagaacttctcctggacctaacccagcaagtcccagtgctgatttcctttgttcacatagtgccaggatgtgtgcagacaccaagaggtttttttaattcacaaagaaacctacaaggacactgtcccatggcgtgatccccaaagacgagtttctggttaaactgtctacttcaagagcaactctgtcatttggagtgtgggctggactgagcccatgccaccatgcctggggtgtgtccttggtaatccaaccaccaagtgggactgggctccccaagggggcatcgtcctccatgcagccactttgtgagtggtttagttttgcattctggaaaggttggttttctttcgaaaccacctttttttctggttgaaccaccttctcagaaatatttcagtgatggtgaatatttgtcatttaagggtgtgtttgagccatagaaaccgccagatgtcttttgacattcaatcttgtgactagcatggggttgtgaatggactgggtgactttttgaatagaggctgtggcagcagaggacatgggggtagggtaataagagtaaaggatgctcatgtggcatcctagcccagtctggggccagtacaatgacaaagcgattggcacatggttggcttttagcaatggatggtgcccttaggacctgtgcttccagcccttgcttcagagctgagcaagccctggaccaaccctccccaagcgagggctacgatcaatgagctcttcctttctccaccctgcaggttctctgattccctcagagtcaaccctggagtcaactgtagcagaaggtaacgtctactatgggggatccctgtaggctcattacccccctgcacccctaggttaatctctgattcagatgaggtgcagagggcatagaaagtagggtgcttagctcccacgaggggcccttccacaaaaggcctcaggtctgaacaggtatatcttgcatcgatcatgtctgagactgaggaggaatcaacttgaagacgcgtctccaaggagttctcagtggagccttttattctgtctctagagattctgttatctttgcttgttgctcactcctgtgttcctcacccagctgtgctcatccgtggccagcctagggttctggatctctggctacagggccttgagggtcaggtgcctacctgctaacgtagccaaattgctaggacagcatccttgcccttgccctttctttaagcctatattatgccacccttgtttcttcttaacagagagaaatcacaatccttcagctcatgggcatcagagctcatgtacttcccccttgggtatctccagtgagaaatctgggagacatagtcaatacatcctgggattctggcagcctgggctttgggaagggaagtcacttcccatttcccatgggaaatcttggccctaggagaagctcaaggacaacattctcaccaaggcctctgcgctgcccagggttggcatgcagttgggaatgctgatggtacatgcatcgggccctcctgttcctcaggtcgtcttctttcttctcccttctccctctggcccatggggtgaggtctgacttaacctcttcctctttcctatgatgaaggacacagaagacacttgaagtgagggtgagactggctttattctgacttagccatgtcccttcgcaagattcccacattttcttatttgcagcagctataagaggagaatctgttccttcctcttgagtggtttcccctgaggtccctgttacatgttaaggaccacaccttggtgggacaagccctttggtataactggtccagccagggatgggagtgagggggcagaggtatttggctgatctgcctgtcacacaggactgcagataggacttacctggagttgctcttatcaggaactctagtgtcagctgggagtcacatttcttctagatctggagacctcacgtagcagcccagtggagagctcagacagaagctgagtgctgtggctgcagtgggttaagggtaactctcagatcacttcctctccaagccccagcactcagtcagctcctgtaggtgccctggacaaattccagggctctggagcaattcaaaaacggagattccaagccagtaccttacttaaaggggaatattagaagcatttctgctaatgtgaaaaacaaggcaagtatgccctccatctccactgctgttcaatgttgtactggaggtagtagccaatgcaatgagagaagagaaatcaattagaggcctaagcatgggaaaagttatttttgcatccctcttctggagttctgtataggttacatgtaggcacatcggaatcagagtgagtatgttggtacagaaatatttcctccccaagcagccctttagaatcaaagaactcaatgctagacaggtttcttgactttcccaaatttacacagcaagacaatatccagatcaggagtgatggctcctcagcagatcctagtttactttcagcccatgagtgtcttcagaggagacctaactttatattttctggttttttttgggggggtgtggtggggtttgtttttcatcttctacaattggcaaaagcagagactaccactacaaatactgagtctactgttgtgacaggtaatgagtaactttgaatccctttctgtaggtcatgttgccaactatatccatgggctttactgttactcaggaaaaattttagggaatgggatgggagggaatgttgtgagtacacagtgaccttctggatcccagaggtcagctagagtgaagcttccttcattgcccatgttcctggaggtagggagaaatcagtcagaatatggtgtctccaagagcctgtgtgctttggaagcagagaccagtgggatcagtctccagtccagagtgacagcccagctcccccatctccacagctctgtgctgaccctaacaatcctggccctgaggaaggctataaggccaggaatatcacgtgacaaatgtgctccaaaccaaccttagagctgcagatacacatcagagctcctcccgggacatcttgatgttatcgtgctgctcttcagtgtggggtgttgtgtgtcccctgtctgagggaatcaggcagagcccatggtctgcttagagaagggtcatgtgtatctctaggtcccctccaggatgcagatcaggaggagccttttattctgctccagctgaagctctaaggcttgggtttgggccaagcagtcactgtcctcttccccatgaagaactctaaccttaaggcctgttaaagcccagcccaattagagattctctcaaagatatctgcctatggggaagaccctgaatgccctgcaggccctgagaccttgtgcctcagtaggaatgtgcaagagaaattctgtgccttcctctaggatctgattctggtttggccctgaggctggtgaatggagatggcaggtgtcagggccgagtggagatcctataccgaggctcctggggcaccgtgtgtgatgacagctgggacaccaatgatgccaacgtggtctgtaggcagctgggttgtggctgggccatgtcagctccaggaaatgcctggtttggccagggctcaggacccattgccctggatgatgtgcgctgctcaggacacgaatcctacctgtggagctgcccccacaatggctggctctcccataactgtggccatggtgaagatgctggtgttatctgctcaggtaggcatccagatctctggagggttgggtgtggtggctcatgcctttaatccccacactttgggaggatgaggtaggcagattgcttgagctcaggcgttcaagaccagctctaggcaagatggcaaaccccatctctattaaaaaaagaaaatcacttgggcccattctggggacagactgtattcagagaatatagtaacaggtttctcactccagggcccccgcccaagtctttcctggttatctggtggctctggagtttagttggggcagttggcctgtgggtacaatgccacggtcagcacaaatccccaagctgcgagcagtgccgcaacattggtttggaggtgactgaggcaccagtgttcagacacagggtccagcatgctgacatcagaaatgatgagctttttattctgctccaggaacatccgcataactcatacccccattttccccgaggctccttctcagggacagcacgttttggggatctggttggtgaagccttccctccccttgaacactgtattaccttgagtgttgtcagccgctgacccagagggaaggatgcaattgtaaatagttcacttatgattgctgtgaagagaggcatggaagtggggtaagggtgggaggatggcagtgagtcgcaaatggtgggctcacgagtgagctcagcatagggagcagggggacctcctagagtatcaccaggaatccacgtcaaacctcagactcatcgcagctcaagcgtggagagttagggtcttcatctactcattgcttagggtggctgtttgctgctccctgggtgttgataccgaggttgttgtggccggtcccaggcaccgaagtgaccttcatatccctggagagtgagccacaggcacagagaaggcaatgccaggggctgtggggtccctgagggaccgagggcttcacggtgggcactggcagggcccacttggtgggcgtgtgatgggcatcagctcagggtgtagataccccaagtcacttcagccttaactctacttggagtcactgagtgtttggtgtctaatgttgctatttttttctcacagctgcccagcctcagtcaacactcaggccaggtgagtccccagaatccttcctcgggataccccttctctttctgctcagttaccccttccctactccacagagccctcctgcttctctgcagatactctggggcatattatttcacccccaactctgtaactgagaccctagcatggggcttcttaaccacacatgggatttagcttctgccttctcttcagtccatctcagctttcatcacacagttccatgctgtcccaatgaacaactcttagaagttcagaaagaagcctgctgtttaatgagctttggcctctttatattcagggctgacacaacctttctgagaattgagggtgagaccctctaatgttctgttgaaggcaaggtcagtacaggcttgatacccccatctctcactacttgaaaaacccccagattctgcagggccacgtctgcattcagaagaggcagaggccatgctgaggggagagagaggctaagaaatgtttctggtgccttcacttaccaggaaacctgatttcccccagggcggacccctagtatcccgaacattttagctgcaagtgtcaagtcttggcagtggtgtcagatgagccagtcagtccacgcgtcagtggatggtgggggatgggggtggtgaaggtttcctaactgcgaataggtcatccctctctcagagagaggtggaagggcctgcatggtgtcctttgtccctgaatgagttccctgggcaggagacctgggcagacacatggggagcaagtggccagaccttcgagtggaattgttttcacagtgcttgcctggtccagagaaccgcttgttttttacctttttcccttcaagtccaattgtatcctttctctttgttgctgtttacagaaagttggcctgtcaggatatcaccacctgtacccacagaaggtaaagaatcctctcaacactccctggggctcactttctacctctggatacactttggatttcatagttcacttatgattgccataaagagaggtggggaagtgggctaagcgtgggagggtggcagcaggtgataaacagttggctcaagagtcagctcggcactgggaacaagagcaggacctcccagaagatcattaggaatcattaggctcatgataggatgaggctcaaggtgggccccttgctttttcatgtttctgtgggttgggtagggaggaagctggagtctctgaaaacccagaattagatgtgatattggagggtggagggtgctggtgacctgtctcctgtgggatcctgttccaagtggtcagaaaagatccttatctatgggctcagaacaagccctgggggtctccctaatcctatggggacctcatccctgccatctctggtactctgccagtcagatcccagataggaccatgctcctgaataagggaggggtctgggcctgccatctggagctgagcagctccatcctctgtgtacccaactggggagtggggcatccattcccatcacatccactggggtcacaggtgcttccccaaaagttgagcatccatagacctgggcagagtaggttatcagtgctactttcacggtgatgaagcctagtctgtggtcatatgcaaaggtgactgcctgcctaggtgacttagttcattaggaagtaccctgagtgtggaacttaccttagattcttgacctcatgatagggatggatgaagggttcttgtgttcccctgtaggatctgaatccagtttggccctgaggctggtgaatggaggcgacaggtgtcgaggccgagtggaggtcctataccgaggctcctggggcaccgtgtgtgatgactactgggacaccaatgatgccaatgtggtctgcaggcagctgggctgtggctgggccatgtcagccccaggaaatgcccagtttggccagggctcaggacccattgtcctggatgatgtgcgctgctcaggacatgagtcctacctgtggagctgcccccacaatggctggctcacccacaactgtggccatagtgaagacgctggtgtcatctgctcaggtgggccttcaagaacttgggctcactctcttggggtggagtttgctccaaaagaaactcctaattacattctgatctcctcactcaaagcttctatgttttctatgtttctgaagacttgtcagctctctgctaagaatccatatgtactcactgcctagtgttcctgtggtcacttaggacaggggatcaaactaaaacaacccagagtttttccccttcctgaggcaaggcaaggaagaggcagaagagaaaagtgccggctccccagggctccatttctcccctgctgagtagcacggtgtgagggtataatggatgcagcacagacagcaaggcaggggagggatcccctcactgcgaggaactctgaactaaagatgcttggctaaaagtgggttctcagctgagacccagtgaggaggtctggaaatagaggctcaagggttaggagtgcaaatgggtgtctgtttgtatcaggcctgggttgcgtggggttggagttcttgacctcagctcttctcagaacgctgctgagcattgcctgtgttctaggtctggtgaggggagggcagtccccatgaggccagccagacatggccttgtcattgcctgtgattggggcttgaagatcgcacaagggattttggctggagtggcttcctcagccttgctgactcaggaacacctaagatgtgcaagggagtgggttggtttaggtcaaccgggttaccctgggcagacacaatttgatcacctcagagctggcaatagtggacaggatctgcctcgaccccttacacggtgcatctctgtggggatgtgcatggcaatgtccctccctgtgtgataggaactaggatggactgagtgtcagactcgctcatttctttccctcctcgttccagttttgccgacttctgtgtaatgttcctgatctgaccttctcttctctttctcacagctccccagtcccggccgacacccagcccaggtaggtccccagtgtccttcctcaaaatgtcccttctctttctgcccaatcaccccttccacactccacagagctctcctgtttctctgtgtggatactgtggggcatattatttccacccccaacaccggctgtgtaactgagatcccagcacagcgctttttaaacacacacaggattgaggaggcctctgtcttcttttcaacccctctcagctttcatgaaacagtttcatactgtcccagtggacaacccttacaggttcaggaagtggccccatgtttaatgagctttggtccttttatattccggactcacatatagtttctgaaaattgagggtgtcaccctctgacccgttcaaggcatcgtcagggcaggctcgatacccccatccatcactgctggaaacattccgagattatgattccgagatttctatccagaagaggcagagtttgtgctcgggcagggagagggataataaaggtttgtgatgtctctgcttaaccagaaacctgattcctgattgtcccctgggcagcccctggttcccctaacattttacctggcagtgtccgagcttcagcaatggcgtctgatgtcctagtcagtccatgcatcagcagatgtgggatggcatggtgggggcatcctctaacagatagaaagataccccaggattacagaaatggagggctcagtctggtctccagcaggacctttgtccctggatgagttcacagcacaggagacctgggaagacacatgggaaacaaatggcaggaacaagaagtggaattgttgtcacgttgattcctcctcccagagatccttttgttctgtgccttttcccttcaagtctaattctgtcttttccttttgttgcaatttacagatacttggccgacctcacatgcatcaacagcaggtaaataaccctctcacccctccctaggactcactatctctggacatattttgtgtttgaaactgataggatgaggctcaatgtgggcttctctgttttcatgtccctgtgggttgcgtgggaggaaggtggaatctctgaggagccagtcctgggtctgatgtttgaggacggagggtgttggtgacctgtctcccatggaatcctgttccaagtggtcaggaaagatcctcatccaggtgctcaggacgagcactggagggctccttaatgctgctgggacctcattcctggccctcaggccatgggatccagacctctgaagagcgggtgaaagtgccggtccctgcacctgtgtggccaaggccttgccatcactggcaatttgccagaaggcagagaggcccatgcaggtgccaataagctcctgaatatggagggggtctaggcctgtcatttgtagctgtgtagctccatcctgtgttcacccagagtggggagtggggtgtccattcctgtcctctcctctggggtcatacatgcttacccatagcttgagcttttatagacttgagtagaatagggcatcactttttccactatgaccaagcttaacctctgggtgcagccatctgccattgtgactgcgtgccctggtgactttggcatttgtattcaaacttgactacttttcccattgccctgagtgttgtccatgccttttccttcacctcagaatggagatggatgaaggattcttgtgttcccctgtaggacctgaatccagtttggccctgaggctggtgaatggaggtgacaggtgtcagggccgagtggaggtcctataccgaggctcctggggcaccgtgtgtgatgatagctgggacaccagtgacgccaatgtggtctgccggcagctgggctgtggctgggccacgtcagccccaggaaatgcccggtttggccagggttcaggacccattgtcctggatgacgtgcgctgctcaggctatgagtcctacctgtggagctgcccccacaatggctggctctcccataactgtcagcacagtgaagacgctggtgtcatctgctcaggtgggcctccaagaccttgggctccctctcttggggtagattttgctcaggaagcgaggtctcattatgttctgatctcctcactcagagctttttcagcctttcctatatatctgatatctccttagctctctcctaggaaactgcatgagtcttcattgccaggttttgaggaggtcaggtaggacaacgggccaaagtgaaataagggtcacgcctttgttcacctaccgaggcagcgcaagcagagggagaagaggaaagtgccaggtctttgccttttagtgtggctggaaaggaatagctggggctggtttgttcatgaggaaagaggctgatttgggtcttggctttgcaggctgcataggaccatggtgcaggcgtctgctcagcttctgatgagggcctcgggctgcttgtactcctagcagaaagggatggggaggtggcctgggcagaggtcacaaggtgagggaggaaggaagagagagcaagagggagggctcagactcttcaaccaccagctcttgctaggaactaagagaagaactcacccctgaccagggagggcactaagttattcatgcagtgttggtctccatgacccagacctggtgcatcaggcctcacctctaaacttggggattcagttgcaatataacacttggatgtgacaagcctctaaagtatagcaccctggctctccagggttccatctttcccctactgaaagattttgcaaagggttacatggatgaagcacatatagaggatgggggagggactgtctccctgggaggagcccagaaccacaggctcctgctaggaagcgcggtcttctgctgaggcccaataaggtgatgtcttaatagagacacaaggctaggagtgcggatgtgtgtctgtccctctctggcctgagatttgggggctgtgagtccttgaccacaactccctccagagcactgcagtgtcttgcctgtgcaccggtctggtgtggagtgtgcagtccccatgaggtctgctaggcaaagcattgttatgaacgcctgtgggctggactggaacatcagaggcaggactttggctggagtggcctcctcacatttgctaactcagggactgctaagacatgcaagggagagggtaggttttgtgtcaacctgattactatgggcagacacaaggttaatcaccttggagttggcaatagtggacaggatctgcccagacaccctccaaggagcatctctgtggggacatgcatggcaatgccctccctctgtgatggggacctagggtggactgaaggcatgatctgtttagttccttccacctttgttccgattttgccagcttctgtatagtgcatctgatctgacctcctctttctcacagctgcccactcctggtcgacgcccagtccaggtgagtccccagtgtccttccttgggatgtcccttctctttctgtataattatccctttctgcactccacagagccctcgttcttctctgagtgaatactacatggcatacaattttcccctgctctgtaactgagaccctggaatggcgcttctgaaccagacatagggttcaagaggcttctgtcttctgttccatttatctcagctttcatgaagcagtttcatactgtcccagtggccaacccttagaggtttaggaagtggcctcatatttaaatagctttgacccttttctattcagagctgatatgaccttcctgagaattgagagtgattgccaaagtctcctcggaagccaatgtcagctaaagccttaaacatggctgccgccatgggcaagcaatgtcagtgcaggcctgacacctcccttcctcactccttccaacacccagattctgcagcgctacatgtgcatccagaagaggcataggccatgctcgggcagggagagggataataaatatttctggtgcctccacttactgggaaacttgatacccctttggtcagctccttggtttccctaacgttttagctcgagctagtagagtgtcagcaatggtgttagatgtacccgtcagtgcatgtgtcagtgcatggaacaggctaaccctttgtgactgagaagaggacatcccacacttcagaggcaggagggatcgaactggtctccagcaaggcttatgtcccttgctgagcttgctgagctgcagacttgggcagacacatggggagcaaagtggcaggaatcagaagtggggtagttttcatgatgctcgccttctccggagacttttccttttggagattttcaccatcaactttaattctagcctttgtctctgttgcaattacagacacgttgccgaccatcaccttacctgcatcgacagtaggtaaataatcctctcgcccctccctagggctcactctctacctctggacaaatgtttttttctgaaatgataggatgagggtcaaggtgggcccctctgtttttcatgtccctgtgggttgcatgggaggaaggtagagtctctggggacccagctgtgggtctgatgttggaggctggagggtgctggtgacttttctcccgtggaatcctgttccaagtggtcaggaaacatcctcatccaggtgccaaggaaaagccctggaagcttccctaatcctactaagacctcattcctgtccctcagcccatgggctgcagaggtgtgaagagtcagtgaaagtgagtgtccccacacctgtctggccaaggccttgtcatacctgtgaaattttcagaagccagacaggaccataggattgccaccaagctcctgagatggggagagtctggcctgcctactgtagctgtgtagctccatcctgtgtgtgcccaggttagggaatggggtttccgttcctgttaactccagtagggtcacaggtgcttccccaaacttgagccttcataaacccaggcagaactgcttctttgactttgatgaagctgaatctctggttttattcatattcaaaggtgactgcctgcccaggtgactttagccattaggacgtgccttgagtgtggaacattccttagattcttgacctcatgatagggatggatgaagggttcttgttttcccctgtaggatctgaatccagtttggccctgaggctggtgaatggaggtgacaggtgtcagggccgagtggaggtcctataccgaggctcctggggcaccgtgtgtgatgacagctgggacaccaatgatgccaatgtggtctgcaggcagctgggctgtggctgggccatgttggccccaggaaatgcccggtttggtcagggctcaggacccattgtcctggatgacgtgcgctgctcagggaatgagtcctacttgtggagctgcccccacaatggctggctctcccataactgtggccatagtgaagacgctggtgtcatctgctcaggtgggcctccaagacttttggtttcctctcttggggtagattttgctcaggaaggttttattatgttctaatctcctcacttagagctttttcaacttttcctatatttctgatacctccttagctctctcctaggaaaccgcatgagtcttcaccacattgccaggttttgaggaggtcagagaggacaatgggccaaagtgaaataagggtcacacctttgttcccctactgaggcagcgcaagcagagggagaagacgaaagcgccgggtctttgccttttagtgtggctggaaaggaatagctggggccaggttgttcatgaagatagaggttgatttgggtcttgggtctttgcaggctgcataggagcatggtgcaggcatctgctcggcttctgctgaggacctcaggctgcttgtactcctggcagaggggatggggagctggcctgggcagaggtcacatggcgagggatgaagcaagatggcagaagaagatggggaggtggcctggacagaggtcacatggtgagggaggaagcaagaaagagcaagagggagggcccagacagttttcaaccaccagctctttctaggaactaagagaagaacttacccctgaccagggaggacactaagttattcatgaagagttggccttcatgacccagacatggcacatcaagcctcacctctatacttggggatccaatcccaacatgagtcttagatgggacaaacatccaaactatagcatgctgcctctccagggttccacctttcccctactgaaaggtttaggtgagggtgaggtggatgcagcacatataggcattgagggagggacggtctgactgggaggattccagaaccaagggctcatgctgggaagggagggttttctgctgaggactaataaggaggcatcagaccggaaacacaaggctgggagtggagattcgtgactgtccatatctgacctgggttttgggggtgtgagtgcttgattgcaattccctccagagcactgcagtgtcttgcctgtgcaccggtcaggtgtggggcaggcagtgcccatgaggcttactgagcaaagccttgttatgaatgcctgtgggctgggctagaagatcacaggctggatattttttttttgcaggagtggcctcttcatacttgctgactcagggactgctaagatgtgcaagggagtgggttggttttgtgtcaacctgattactatgggcagacacaaagtccttcaaacacccccagatgcagcagggccccatctacatgcggaaaggcagaggccgtgctcaggcaaggagagagatattagatatttctggtacctccacttgccaggagactttatactcctttgggcagctccctgatccttctaacattttagctgtaacaatcagaggctcagcaatggtgtcagatgtgtccattagtccatgtgtcagtggatggggcaggcaaaccctttgtagctgagaagaggatatcccacacttcagaggtaggagggattggactggtctccagcgaggcctatgtcccttcctgagcttactgggctgaagagttgggcagacacatggggagcaagtggcaaaaaccagaaatccagtagttttcatgatgcttgccctatctggagacttttccttttggagcttttcaccctcaagtttaattctagcctttgtctttgttgcaattaaagacacgttgccgaccaccacattacctgcatcaacagtaggtacagaatcttctcacccccactagggctcactctctacttctggacaaatgtttttttctgaaaatgagaggatgagggtcagggtgggtccctgtctttttcatatccctgtgcattgagtgggaggaagttggagtctctggggagccagtcctgcttctggtgttggagggtagagggggctggtgacctgtctcccttgggatcctcttccaagtatcaggaaataataaagaaaaaaaaaaaagatcctcatccaggtgctgaggacaagccctggagggctccctactcctattcgacctcgttcctggccctccagccatgcactgcagacctgcaagggtgggtgacagtttctgtccctgcagctgtctggccaaagccttgccatccttggcaatttgccagaagccagggaggaccatgggggtgccacctaactcttgaacatggggacagcatggtcctgccctctggagctgtggagctccatcctgtgtgtgcccagagtagggagtcggttgtctattcctgtcacctccactggggtcacaggtgcttccccaaaacttgagccttcataaacccaaggagaatagtgtatcacctctccttctactgtgatgaagctgaacctctggttgcagtcatctttaatcgtgactgcctgcccaggtgactttggccattaggaagtgccctgagtgtggaatgtgccttagatccttgacctgctgatagggattgatgaagggttcttgtgttctcctataggacctgaatccagtttggccctgaggctggtgaatggaggtgacaggtgtcagggccgagtggaggtcctataccgaggctcttggggcaccgtgtgtgatgacagctgggacaccaatgatgccaatgtggtctgcaggcagctgggctgtggctgggccacgtcagccccaggaaatgcccggtttggtcagggctcaggacccattgtcctggatgatgtgcgctgctcaggacatgagtcctacctgtggagctgccccaacaatggctggctctcccacaactgtggccatcatgaagatgctggtgtcatctgctcaggtgggcctccagcaattttggtttcctctcttggggtagattttgcccaggaagagaggtcttatgttctaatctcctcactcagagctttttcaacctttcctatgtttctgatatctccttagctctcttctaggaaactgcatgagtcttcaccacagtgccaggttttgaggaggtcagagaggacaatgggccaaagtgaaataagggtcatgcctttgttcccctaccaaggcagcgcaagcagagggagaagaggaaagggctgggtctttgcattttagtgtggctggaaaggaatggctggggtcaggttattcatgaagaaagaggcagatttgggtcttggctttgcaggctgcataggagcgtggtatctgcttggcttctgctgacagcctcaggctgcttgtgctcctggcagaaggagatggggaggtggcctgagcagaggtcacgtggcaagggaggaagcaagagagggcaagaaggaaggcccaggctcttttcaaccaccagttcttgctagaaactaagagaagaactcacccctgatcagggagggcactaagttgttcatgaatggttggcttccatgacccagacatggcacatcaggcctcacctctatacttggggatccaatcccaacatgagtcttgtatgggacaaacatccaatctatagcacactggctctccagggttccatctttcccccactgaaaggtttaggtgagggtgaggtggatggagcacatataggtgttgggggacggacgatctcaccgggaggagtccagaaccaaaggcttatgctgggaagggagggtcttccgctgaggcccagtaaggaggcatcagactggaaacacaaggctgggagtgcagatctgtgtctgtccaagtctggcctgggttttgggggtgtgagtgcttgactgcaattccctccagagcactgcagcatcttgcctgtacaccagtcaggtgtagggcgggcagtgcccattagggctgctgagcaaagccttgttatgaatgcctgtgggctgggctagaagatcacaggctggatttttgctggagtggcctcttcatacttgctgactcagggactgctaagacgtgtaagggagagggttggttttgtgtcaacctgattactgtgggtagacacaaacttaatcactttggagctggcagtagtggacaagatctgcccagatgcctttcaaggagcatctttgtggggacgtgcatggcaatgcccctccctctgtgatggggacatagggtggactgaaggcgctaccagtttagttccttgtacctttgttctggttttgccagcttctgtatagtgcatctgatctgacctcctctttctcacagctgcccagtcccggtcgacgcccaggccaggtgagtccccagtgtccttccttgggatgtcccttttctttctgcacaattatcctttttcccattccacagagccctccttcttacctgtgtggatactgtgggtcatactattttccctgctctgtaactgagaccctagcatggagcttcttaaccagacatggttaagaaggtatgatctttctaagaattgagagtgattgccaaagtctcctgggaaggcaatttcagctaaagccttaaacatgcctgtccatgggcaagaatgtcagtgcaggcctgatacctccattcctcactccttcagacacccccagatgcggcagggccccatctacctccagacaggcagaggctgtgctcaggcagggagagcgatattagatatttccgttgcctccacttgccaggagactttatactcccttaggcagctccctgatccttctaacattttagtttcaagcgtgagaggctcagcattggtgtcagatgtgcccatcagtccatgtgtcagtggatggggcaggtaaaccctttgtagctgagaagagggtattccacacttcagaggcaggagggatcggactggtctccagtgaggactatgtccctggctgtgcttcctgagctacagacttgggcagacacatggggagcaagtggcaggaactagaaatggaagaatattcatgatgcttgccttgtccagagacctttccttttggagcttttctccctcaactttaattctagcctttgtctttgttgcaatttacagacacgttgtcgaccatcacgttacctccatcgacagtaggtaaataatcctctcacccctccctagggctcactctctacctctggacaaatgttttctctgaaaatgataggatgagggtcaaggtgggcccctgtctttttcacatccctgtgcgctgagtgggaggaagttgagtctctggggaaccagtcccgggtcgggtgttagagggtggagggtgttggtgacctatctcctgttggaccgtgttccaagtatcagtaaagatcctcattcaggtgctggacaaaccctggagagctccctactcctgggacctcattcctggccttctggccatgcattgcagacctgcaagggagggtgaaaatttctgtccctgcagttgtctggccaatgtgttgccatccctggcaatttgccagaagccagagaggaccacgtgggtgccaccaaactcttcgacatggggatagcataggcctgccctctggagcagtggagctccatcctgtgtgtgctcagagtagggagtggggtgtccattcctgtcacctccactggggtcacaggcgctttcccaaaatctgagcctccataaacccaggcagaatagggtatcacctctccttccagtatgatgaagctgaacctctggttgcagtcgtattcaatcgtgactgcttgtccaggcgaccttggccattaggaagtaccctgagtgtggaacgtgccttagatccttacctcatggtagggatggataaagggttcttgtgttcccctgtaggatctgaatccagtttgaccctgaggctggtgaatggaagtgacaggtgtcagggccgagtagaggtcctataccgaggctcctggggcaccgtgtgtgatgacagctgggataccaatgatgccaatgtggtctgcaggcagctgggctgtggctgggccacgtcggccccaggaaatgcccggtttggccagggctcaggacccattgttctggatgatgtgcgctgctcaggacacgagtcctacctgtggagctgcccccacaatggctggctctcccacaactgtggccatcatgaagatgctggtgtcatctgctcaggtgggcctccaagaccttgggctccctctcctagactggagtttgctcaggaagaaaatcctaattacattctgatctcctcactcaaagattcttctatgtttcctatatttatgtagtcttgttagctctctgctaaggatctgtatgaattttactacagggcttggtgttcctgtggtcacttaggacaggccccaaactgaaacaacaacccagactttatccccttcctgaggcagtgcaagaaagaggccgaagagaaaactgctggctccccagggttccatttctcctcagctgagtagcactgggtgagggtatcatggacataggacagacagcaaggtaggggaggaatcctctcactgagaggaactctgagctaaagatgcttgtctgaaagtgagttctcagctgagacccagtgaggaggtctggaaatagaggctcaagggttaggggtgcaaatgggtgtctggttctatcaggcctgggttgtgtgaggttggagtccttgacctcaggtcctctcagaacgctgcagagcactgccttgccctgggtctggtgtggggagggcagcccccatgagacaggccaggcatggccttgttattgcctgtggtcggggcttgaagatcacacaagggattttggctggagtggcttcctcagccttgctgactcaggaacacctaagatgtgcaagggagtgggttggtttaggtcaaccgggttaccctgggcagacacaatttgatcacctcagagctggcaatagtggaaggatctgcctcgaccccttacacggtgcatctctgtggggatgtgcatggcaatgtccctccctgtgtgataggaactaggatggactgagtgtcagactcgctcatttctttccctcctcgttccagttttgccgacttctgtgtaatgttcctgatctgaccttctcttctctttctcacagtttcccagtcccggccgacacccagtccaggtaggtccccagtgtccttcctcaaaatgtcccttctctttctgcccaatcaccccttccacactccacagagctctcctgtttctctgtgtggatactgtggggcatattatttccacccccaacaccggctgtgtaactgagaccccagcacagcgctttttaaacacacacaggattgaggaggcctctgtcttcttttcaacccctctcagctttcatgaaacagtttcatactgtcccagtggacaacccttacaggttcaggaagtggccccatgtttaatgagctttggtccttttatattccggactcacatatagtttctgaaaattgagggtgtcaccctctgacccgttcaaggcatcgtcagggcaggctcgatacccccatccatcactgctggaaacattccgagattatgattccgagatttctatccagaagaggcagagtttgtgctcgggcagggagagggataataaaggtttgtgatgtctctgcttaaccagaaacctgattcctgattgtcccctgggcagcccctggttcccctaacattttacctggcagtgtccgagcctcagcaatggcgtctgatgtcctagtcagtccatgcatcagcagatgtgggatggcatggtgggggcatcctctaacagatagaaagataccccaggattagagaaatggagggctcagtctggtctccagcaggacctttgtccctggatgagttcacagcacaggagacctgggaagacacatgggaaacaaatggcaggaacaagaagtggaattgttgtcacgttgattcctcctcccagagatccttttgttctgtgccttttcccttcaagtctaattctgtcttttccttttgttgcaatttacagatacttggccgacctcacatgcatcaacagcaggtaaataaccctctcacccctccctaggactcactatctctggacatattttgtgtttgaaactgataggatgaggctcaatgtgggcttctctgttttcatgtccctgtgggttgcgtgggaggaaggtggaatctctgaggagccagtcctgggtctgatgtttgaggacggagggtgttggtgacctgtctcccatggaatcctgttccaagtggtcaggaaagatcctcatccaggtgctcaggacgagcactggagggctccttaatgctgctgggacctcattcctggccctcaggccatgggatccagacctctgaagagcgggtgaaagtgccggtccctgcacctgtgtggccaaggccttgccatcactggcaatttgccagaaggcagagaggcccatgcaggtgccaataagctcctgaatatggagggggtctaggcctgtcatttgtagctgtgtagctccatcctgtgttcacccagagtggggagtggggtgtccattcctgtcctctcctctggggtcatacatgcttacccatagcttgagcttttatagacttgagtagaatagggcatcactttttccactatgaccaagcttaacctctgggtgcagccatctgccattgtgactgcgtgccctggtgactttggcatttgtattcaaacttgactacttttcccattgccctgagtgttgtccatgccttttccttcacctcagaatggagatggatgaaggattcttgtgttcccctgtaggacctgaatccagtttggccctgaggctggtgaatggaggtgacaggtgtcagggccgagtggaggtcctataccgaggctcctggggcaccgtgtgtgatgatagctgggacaccagtgacgccaatgtggtctgccggcagctgggctgtggctgggccacgtcagccccaggaaatgcccggtttggccagggttcaggacccattgtcctggatgacgtgcgctgctcaggctatgagtcctacctgtggagctgcccccacaatggctggctctcccataactgtcagcacagtgaagacgctggtgtcatctgctcaggtgggcctccaagaccttgggctccctctcttggggtagattttgctcaggaagcgaggtctcattatgttctgatctcctcactcagagctttttcagcctttcctatatatctgatatctccttagctctctcctaggaaactgcatgagtcttcattgccaggttttgaggaggtcaggtaggacaacgggccaaagtgaaataagggtcacgcctttgttcacctaccgaggcagcgcaagcagagggagaagaggaaagtgccaggtctttgccttttagtgtggctggaaaggaatagctggggctggtttgttcatgaggaaagaggctgatttgggtcttggctttgcaggctgcataggaccatggtgcaggcgtctgctcagcttctgatgagggcctcgggctgcttgtactcctagcagaaagggatggggaggtggcctgggcagaggtcacaaggtgagggaggaaggaagagagagcaagagggagggctcagactcttcaaccaccagctcttgctaggaactaagagaagaactcacccctgaccagggagggcactaagttattcatgcagtgttggtctccatgacccagacctggtgcatcaggcctcacctctaaacttggggattcagttgcaatataacacttggatgtgacaagcctctaaagtatagcaccctggctctccagggttccatctttcccctactgaaagattttgcaaagggttacatggatgaagcacatatagaggatgggggagggactgtctccctgggaggagcccagaaccacaggctcctgctaggaagcgcggtcttctgctgaggcccaataaggtgatgtcttaatagagacacaaggctaggagtgcggatgtgtgtctgtccctctctggcctgagatttgggggctgtgagtccttgaccacaactccctccagagcactgcagtgtcttgcctgtgcaccggtctggtgtggagtgtgcagtccccatgaggtctgctaggcaaagcattgttatgaacgcctgtgggctggactggaacatcagaggcaggactttggctggagtggcctcctcacatttgctaactcagggactgctaagacatgcaagggagagggtaggttttgtgtcaacctgattactatgggcagacacaaggttaatcaccttggagttggcaatagtggacaggatctgcccagacaccctccaaggagcatctctgtggggacatgcatggcaatgccctccctctgtgatggggacctagggtggactgaaggcatgatctgtttagttccttccacctttgttccgattttgccagcttctgtatagtgcatctgatctgacctcctctttctcacagctgcccactcctggtcgacgcccagtccaggtgagtccccagtgtccttccttgggatgtcccttctctttctgtataattatccctttctgcactccacagagccctcgttcttctctgagtgaatactacatggcatacaattttcccctgctctgtaactgagaccctggaatggcgcttctgaaccagacatagggttcaagaggcttctgtcttctgttccatttatctcagctttcatgaagcagtttcatactgtcccaatggccaacccttagaggtttaggaagtgacctcatatttaattagctttggcacttttctattcagagctgatatgaccttcctgagaattgagagtgattgccaaagtctcctgggtagccaatgtcagctaaagccttaaacatggctgccgccacaggcaagcaatgtcagtgcaggcctgacacctcccttcctcactccttccaacaccccagattctgcagggctacatgtgcatccagaagaggcataggccatgctcgggcagggagagggataataaatatttctggtgcctccacttactgggaaacttgatacccctttggtcagctccttggtttccctaacattttagctcgagctagtagagtgtcagcaatggtgttagatgtacccgtcagtgcatgtgtcagtgcatggaacaggctaaccctttgtgactgagaagaggacatcccacacttcagaggcaggagggatcgaactggtctccagcaaggcctatgacccttgctgagcttgctgagctgcagacttgggcagacacatggggagcaagtggcaggaaccagaagtggggtagttttcatgatgtttgccttctccggagacctttccttttggagattttcaccatcaactttaattctagcctttgtctctgttgcaattacagacacattgccgaccatcaccttgcctgcatcgacagtaggtaaatattcctctcgcccctccctagggctcactctctacctctggacaaatgttttttctgaaaatgataggatgagggtcaaggtgggcccctctctttttcatgtccctgtgggttgcatgggaggaaggtagcgtctctggggacccagctctgggtctgatgttggaggctggagggtgctggtgacttgtctcccgtggaatcctgttccaagtggtcaggaaacatcctcatccaggtgctgaggaaaagccctggagggttccctaatcctactaagacctcattcctgtccctcagcccatgggctgcagaggtgtgaagagtcggtggaagtgactgtccccacacctgtctggccaaggccttgtcatacctgtgaaattttcagaagtcagacaagaccataggattgccaccaagctcctgagatggggagagtctggcctgcctactgtagctgtgtagctctgtcctgtgtgtacccaggttagggaatggggtttccattcctgttaacttcagtagggtcacagatgcttccccaaaacttgagccttcataaacccaggcagaatagggtgtcactgcttctttgactttgatgaagctgaatctctgattttattcatattcaaaggtgactgcctgcccaggtgactttagccattaggacatgccttgagtgtggaacattccttagattcctgacctcatgatagggatggatgaaggattcttgtgttcccctgtaggatctgaatccagtttggccctgaggctggtgaatggaggtgacaggtgtcagggccgagtggaggtcctataccaaggctcctggggcaccgtgtgcgatgacagctgggacaccaatgatgccaatgtcgtctgcaggcaactgggctgtggctgggccatgtcagccccaggaaatgcccggtttggtcagggctcaggacccattgtcctggatgatgtgcgctgctcaggacacgagtcttacctgtggagctgcccccacaatggctggctctcccacaactgtggccatagtgaagacgctggtgtcatctgctcaggtgggccttcaagaacttgggatcactctcttggggtggagtttgctccagaagaaactcctaattacattctgatctcctcactcaaagcttcttctatgttttctatatttctgaagacttgttagctctctgctaagaatccctatgtactcactgcctagtgttcctgtggtcacttaggacaggggaccaaactcaaacaacccagagtttttccccttcctgagggaaggcaaggaagaggcagaagagaaaagtgctggctccccagggctccatttctcccctgctgagtagcacggtgtgagggtataatggatgcaggacagacagcaaggcggggtagggatcctctcactgtgaggaactctgaactaaagatgcttgtctgaaagtgggttctcagctgagacccagtgaggaggtctggaaatagaggctcaagggttaggagtgcaaatgggtgtctgattctatcacgcctgggttgtgtgaggttggagtccttgacctcaggtcctctcagatcactgctgagcattgcctgtgccccaggtctggtgtggggagggcagcccccatgaggccggccaggcatggccttgtcattgcctgtgatcagggcttgaggacggcacaagggattttggctggagtggcttcctcagccttgctgactcaagaatgcctaagacgtgcaagggagagggttggtttaggccaaccgggttaccctgggcagacacaagttgatcacctcagagctggcaatagtggacaggatctgcctcgaccccttacatggtgcatctctgtggggatgtgcatggcaatgcccctccctgtgtgataggaactaggatggactgagtgtcagactcgcccatttctttccctcctcgttccactttgccgacttctgtgtaatgttcctgatctgaccttctcttctctttctcacagcttcccagtcccggccaacacctagtccaggtgggtccccagtgtccttcctcaaaatgtcccttctctttctgcccaatcaccccttccacactccacagagctctcctgtttctctgtgtggatactgtggggcatattatttctacccccaacaccagttgtgtaactgagaccccagcacagcgctttttaaacacacacaggattgaggaggcctctgtcttcttttcaacccctctcagctttcatgaaacagtttcatactgtcccagtggacaacccttacaggttcaggaagtggccccatgtttaatgagctttggtccttttatattccggactcacatatagtttctgaaaattgtgagtgtcaccctctgacctgttcaaggcatcatcagggcaggctcgatacccccatccttcactgctggaaacattccgagattatcatgggccacatttgtatccagaaaaggcagagtttgtgcttgggcagggagagggataataaaggtttgtgatgtcactgcttaaccagaaacctgattcctgattgtcccctgggcagcccctggttcccctaacattttatctgccagtgtccgagcctcagcaatggcgtctgatgtcctagtcagtccatgcatcagcagatgtgggatggcatggtgggggcatcctctaagagatagaaagataccccaggattagagaaatggagggctcagtctggtctccagcaggacctttgtccgtggatgagttcacagcagaggagacctgggaagacacatgggaagcaagtggcaggaacaggaagtggaattgttgccaggtggattccccctcccagagaaccttttgttctgcaccttttcccttcaagtctaattctgtcttttcctttgttgcaatttacagacacttggccaacctcacatgcatcaacagcaggtaaataatcctctcacccctccctagggctcactgtctctggacatattttgtgtttgaaactgataggatgaggctcaaggtgggcccctcttttttcactcccctgtgggttgcgtgggaggaaggtggaatctctgaggagccagtgctgggtctgatgtttgaggatggagggtgctggtgactgtctcccatggaatcctgttccaagtggtcaggaaagatcctcatccaggtgctcaggatgagcactggagggctccttaatcctactgggacctcgttcctggccctcaggccatgggatccagatctctgaagagcaggtgaaagtgccagtctctgcacttgtgtggccaaggtcttgccatcactggcaaattgccagaaggcagagaggaccatgcaggtgccaatgagctcctgaattcggagggggtctgggcttgtcatttgtagctgtgtatctccatcctttgtgtacccagagtggggaatggggtgtccattcctgtcccctcctctggggtcatacatgcttacccatagcttgagcttttatagacttgagtagaatagggcatcactttttccactatgacaaagcttaacctctgggtgcagctatcttccatcatgactgcatgccctggtgacttctgcattcgtattgaaacttgactactttgcccactgccctgattgttgtccatgccttatccttgacctcatatttgagatggatgaagcgttcttgtgttcccctgtaggatctgaatccagtttggccctgaggctggtgaatggaggtgacaggtgtcagggccgagtggaggtcctataccgaggctcctggggcaccgtgtgtgatgactactgggacaccaatgatgccaatgtggtttgcaggcagctgggctgtggctgggccatgtcagccccaggaaatgcccggtttggccagggttcaggacccattgtcctggatgatgtgcgctgctcaggacatgagtcctatctgtggagctgcccccacaatggctggctctcccacaactgtggccatcatgaagacgctggtgtcatctgctcaggtgggcctccaagaccttcggctccctctcctaggttggagtttgctcaggaagaaaatcctaattacattatgatctcctctgaactcacagattcttctatgtttcttgtatttatgcagccttgttagctccctgctaagaatctgtatgaattttgctacagcggttggtgttcatgtggtcacttaggacaggggaccaaagtcaaacaacaacccagactttatccccttcctgaggcagtgcaaggaagaggcagaagagaaaactgctggctccccagggctccatttcttccctgctgagtagcagtggttgagggtatcatggacataggacagacagcggggcagaggagggatcctctcactgtgaggaactctgaaccaaagatgcttgtctggaagtgggttctcagctgagacccagtgaggaggtctggaaacagaggctcaagggttaggagtgcaaaatgggtgtctggttctatcaggcctgggttgtgtgaggttggagtccttgacctcaggtcctctcagaacgctgcagagcactgccttgccctgggtctggtgtggggagggcagcccccatgagactggccaggcttggcctcattattgcctgtggtcggggcttgaagatcacacaagggattttggctggagtggcttcctcagccttgctgactcaggaacacttaagatgtgcaagggagtgggttggtttaggtcaactgggttaccctgcgcagacacaatttgatctcctcagagctggcaatagtggacaggatctgcctcaaccccttacacggtgcatctctgtggggatgtgcatggcaatgtccctccctgtgtgataggaactaggatggactgagtgtcagactcgcccatttctttccctcctcattccagttttgtcgacttctgtgtaacattcctgatctgaccttctcttctctttctcacagcttcccagtcccagccgacacccagcccaggtaagttcccagtgtccttcctcaaaatgtcccttctctttctgcccaatcaccccttccccactccacagagctctcctgtttctctgtgtggatactgtggggcatattatttctaccgccaccaccggctgtatttcacatgggtccttttctattttccctaagtgtcagccggtctgagaaataaagggaaggcatacaaaagagcaaaattttaaagctgggtgttggggggagacatcacatgtcagcaggttccgtgatccctcctgagtagcaaaaccagcaagtttttattggtgattttcaaaaggggagggagtgcacaaatagggtgtgggtcacagagatcacatccttcacaaggtaataaaatatcacaaggtaaatggaggcagggcaagatcacaggactggggtgaaattaaaattgctaatgaagtttcgggcacgcattgtcattgaaaacattttatcaggagacagggtttgagagcagacaactggtctgaccaaaatttattaggaggcaatttcctcatcctaataagcctggaagcgctacgggggaccggggcttatttcatcccttatctgtaagcgtaaaagacagacgttcccaaagcggccatttcagaggcctccccttaggaacacattctctttctcagggatgttccttgctgagaaaaggaattcagcgatatttctcctatttgcttttgaaggaagagaaatgtggctctgttctgcctggcccacaggcagccagcctttaaggttatctcccttgttccctgaacaacgctgttatcctgttcttttttcacagtgcccagatttcatattgtttaaacaatttctgcagttaacgcaatcatcacagggtcctgaggtgacattcatcctcagtttatgaagaagatgggattaagagattaaagtaaagacaggcataggaaatcacaagagtattgattggggaagtgataagtgtccatgaaatcttcacaatttatgttcagagattgcagtaaagacaggcgtaagaaattataaaaatattaatttggggaactaataaatgtccatgaaatcttcaaatttatgttcttgtgccatggcctcagccggtccctctgtttggggtccctgacttcccgcaacacagcacagtgctttgaaaacacacataggattcaggaggcctctgtcttcttttcaacccctctcagctttcatgaaacagtttcatactgtcccagtggacagcccttacaggttcaggaagtggccccatgtttaatgagttttggtccttttatattcaggactcacatatagtttcgaaaattgagggtgtcaccctctgacctgttcaaggcattgtcagggcaggctcgatacccccatccatcactgctggaaaaattctgagattatgatggaccacatttgtatccagaagaggcagggtttgtgcttgggcagggaaagggataataaaggtttgtagtgtctctgcttagccagaaacctgattcctgattgtcccctgggcagcccctggttcccctaacattttatctgccagtgtctgagcctcagcaatggcatctgatgtcctagtcagtccatgcatcagcagatgtgggattgcatggtggggggcatcctctaacagatagaaagataccccaggattagagaaatggagggctcagtctggtctccagcaggacctttgttcatggatgagttcacagcagaggagacctgggaagacacatgggaagcaagtggcaggaacaggaagtggaattgttgccaggtggattccccctcccagagaaccttttgttctgcaccttttcccttcaagtctaattctgtcttttcctttgttgcaatttacagacacttggccaacctcacatgcatcaacagcaggtaaataatcctctcacccctccctagggctcactgtctctggacatattttgtgtttgaaactgataggatgaggctcaaggtgggcccctcttttttcactcccctgtgggttgcgtgggaggaaggtggaatctctgaggagccagtgctgggtctgatgtttgaggatggagggtgctggtgactgtctcccatggaatcctgttccaagtggtcaggaaagatcctcatccaggtgctcaggatgagcactggagggctccttaatcctactgggacctcgttcctggccctcaggccatgggatccagatctctgaagagcaggtgaaagtgccagtctctgcacttgtgtggccaaggtcttgccatcactggcaaattgccagaaggcagagaggaccatgcaggtgccaatgagctcctgaattcggagggggtctgggcttgtcatttgtagctgtgtatctccatcctttgtgtacccagagtggggaatggggtgtccattcctgtcccctcctctggggtcatacatgcttacccatagcttgagcttttatagacttgagtagaatagggcatcactttttccactatgacaaagtttaacctctgggtgcagctatcttccatcatgactgcatgccctggtgacttctgcattcgtattgaaacttgactactttgcccactgccctgattgttgtccatgccttatccttgacctcatatttgagatggatgaagcgttcttgtgttcccctgtaggatctgaatccagtttggccctgaggctggtgaatggaggtgacaggtgtcagggccgagtggaggtcctataccgaggctcctggggcaccgtgtgtgatgactactgggacaccaatgatgccaatgtggtttgcaggcagctgggctgtggctgggccacgtcagccccaggaaatgcccggtttggccagggttcaggacccattgtcctggatgatgtgcgctgctcaggacatgagtcctatctgtggagctgcccccacaatggctggctctcccacaactgtggccatcatgaagacgctggtgtcatctgctcaggtgggcctccaagaccttcggctccctctcctaggttggagtttgctcaggaagaaaatcctaattacattatgatctcctctgaactcacagattcttctatgtttcttgtatttatgcagccttgttagctccctgctaagaatctgtatgaattttgctacagcggttggtgttcatgtggtcacttaggacaggggaccaaagtcaaacaacaacccagactttatccccttcctgaggcagtgcaaggaagaggcagaagagaaaactgctggctccccagggctccatttcttccctgctgagtagcagtggttgagggtatcatggacataggacagacagcggggcagaggagggatcctctcactgtgaggaactctgaaccaaagatgcttgtctggaagtgggttctcagctgagacccagtgaggaggtctggaaacagaggctcaagggttaggagtgcaaaatgggtgtctggttctatcaggcctgggttgtgtgaggttggagtccttgacctcaggtcctctcagaacgctgcagagcactgccttgccctgggtctggtgtggggagggcagcccccatgagactggccaggcttggcctcattattgcctgtggtcggggcttgaagatcacacaagggattttggctggagtggcttcctcagccttgctgactcaggaacacctaagatgtgcaagggagtgggttggtttaggtcaactgggttaccctgcgcagacacaatttgatctcctcagagctggcaatagtggacaggatctgcctcaaccccttacacggtgcatctctgtggggatgtgcatggcaatgtccctccctgtgtgataggaactaggatggactgagtgtcagactcgcccatttctttccctcctcattccagttttgtcgacttctgtgtaacattcctgatctgaccttctcttctctttctcacagcttcccagtcccagccgacacccagcccaggtaagttcccagtgtccttcctcaaaatgtcccttctctttctgcccaatcaccccttccccactccacagagctctcctgtttctctgtgtggatactgtggggcatattatttctaccgccaccaccggctgtatttcacatgggtccttttctattttccctaagtgtcagccggtctgagaaataaagggaaggcatacaaaagagcaaaattttaaagctgggtgttggggggagacatcacatgtcagcaggttccgtgatccctcctgagtagcaaaaccagcaagtttttattggtgattttcaaaaggggagggagtgcacaaatagggtgtgggtcacagagatcacatccttcacaaggtaataaaatatcacaaggtaaatggaggcagggcaagatcacaggactggggtgaaattaaaattgctaatgaagtttcgggcacgcattgtcattgaaaacattttatcaggagacagggtttgagagcagacaactggtctgaccaaaatttattaggaggcaatttcctcatcctaataagcctggaagcgctacgggggaccggggcttatttcatcccttatctgtaagcgtaaaagacagacgttcccaaagcggccatttcagaggcctccccttaggaacacattctctttctcagggatgttccttgctgagaaaaggaattcagcgatatttctcctatttgcttttgaaggaagagaaatgtggctctgttctgcctggcccacaggcagccagcctttaaggttatctcccttgttccctgaacaacgctgttatcctgttcttttttcacagtgcccagatttcatattgtttaaacaatttctgcagttaacgcaatcatcacagggtcctgaggtgacattcatcctcagtttatgaagaagatgggattaagagattaaagtaaagacaggcataggaaatcacaagagtattgattggggaagtgataagtgtccatgaaatcttcacaatttatgttcagagattgcagtaaagacaggcgtaagaaattataaaaatattaatttggggaactaataaatgtccatgaaatcttcaaatttatgttcttgtgccatggcctcagccggtccctctgtttggggtccctgacttcccgcaacacagcacagtgctttgaaaacacacataggattcaggaggcctctgtcttcttttcaacccctctcagctttcatgaaacagtttcatactgtcccagtggacagcccttacaggttcaggaagtggccccatgtttaatgagttttggtccttttatattcaggactcacatatagtttcgaaaattgagggtgtcaccctctgacctgttcaaggcattgtcagggcaggctcgatacccccatccatcactgctggaaaaattctgagattatgatggaccacatttgtatccagaagaggcagggtttgtgcttgggcagggaaagggataataaaggtttgtagtgtctctgcttagccagaaacctgattcctgattgtcccctgggcagcccctggttcccctaacattttatctgccagtgtctgagcctcagcaatggcatctgatgtcctagtcagtccatgcatcagcagatgtgggattgcatggtggggggcatcctctaacagatagaaagataccccaggattagagaaatggagggctcagtctggtctccagcaggacctttgttcatggatgagttcacagcagaggagacctgggaagacacatgggaagcaagtggcaggaacaggaagtggaattgttgccaggtggattccccctcccagagaaccttttgttctgcaccttttcccttcaagtctaattctgtcttttcctttgttgcaatttacagacacttggccaacctcacatgcatcaacagcaggtaaataatcctctcacccctccctagggctcactgtctctggacatattttgtgtttgaaactgataggatgaggctcaaggtgggcccctcttttttcactcccctgtgggttgcgtgggaggaaggtggaatctctgaggagccagtgctgggtctgatgtttgaggatggagggtgctggtgactgtctcccatggaatcctgttccaagtggtcaggaaagatcctcatccaggtgctcaggatgagcactggagggctccttaatcctactgggacctcgttcctggccctcaggccatgggatccagatctctgaagagcaggtgaaagtgccagtctctgcacttgtgtggccaaggtcttgccatcactggcaaattgccagaaggcagagaggaccatgcaggtgccaatgagctcctgaattcggagggggtctgggcttgtcatttgtagctgtgtatctccatcctttgtgtacccagagtggggaatggggtgtccattcctgtcccctcctctggggtcatacatgcttacccatagcttgagcttttatagacttgagtagaatagggcatcactttttccactatgacaaagtttaacctctgggtgcagctatcttccatcatgactgcatgccctggtgacttctgcattcgtattgaaacttgactactttgcccactgccctgattgttgtccatgccttatccttgacctcatatttgagatggatgaagcgttcttgtgttcccctgtaggatctgaatccagtttggccctgaggctggtgaatggaggtgacaggtgtcagggccgagtggaggtcctataccgaggctcctggggcaccgtgtgtgatgactactgggacaccaatgatgccaatgtggtttgcaggcagctgggctgtggctgggccacgtcagccccaggaaatgcccggtttggccagggttcaggacccattgtcctggatgatgtgcgctgctcaggacatgagtcctatctgtggagctgcccccacaatggctggctctcccacaactgtggccatcatgaagacgctggtgtcatctgctcaggtgggcctccaagaccttcggctccctctcctaggttggagtttgctcaggaagaaaatcctaattacattatgatctcctctgaactcacagattcttctatgtttcttgtatttatgcagccttgttagctccctgctaagaatctgtatgaattttgctacagcggttggtgttcatgtggtcacttaggacaggggaccaaagtcaaacaacaacccagactttatccccttcctgaggcagtgcaaggaagaggcagaagagaaaactgctggctccccagggctccatttcttccctgctgagtagcagtggttgagggtatcatggacataggacagacagcggggcagaggagggatcctctcactgtgaggaactctgaaccaaagatgcttgtctggaagtgggttctcagctgagacccagtgaggaggtctggaaacagaggctcaagggttaggagtgcaaaatgggtgtctggttctatcaggcctgggttgtgtgaggttggagtccttgacctcaggtcctctcagaacgctgcagagcactgccttgccctgggtctggtgtggggagggcagcccccatgagactggccaggcttggcctcattattgcctgtggtcggggcttgaagatcacacaagggattttggctggagtggcttcctcagccttgctgactcaggaacacctaagatgtgcaagggagtgggttggtttaggtcaactgggttaccctgcgcagacacaatttgatctcctcagagctggcaatagtggacaggatctgcctcaaccccttacacggtgcatctctgtggggatgtgcatggcaatgtccctccctgtgtgataggaactaggatggactgagtgtcagactcgcccatttctttccctcctcattccagttttgtcgacttctgtgtaacattcctgatctgaccttctcttctctttctcacagcttcccagtcccagccgacacccagcccaggtaagttcccagtgtccttcctcaaaatgtcccttctctttctgcccaatcaccccttccccactccacagagctctcctgtttctctgtgtggatactgtggggcatattatttctaccgccaccaccggctgtatttcacatgggtccttttctattttccctaagtgtcagccggtctgagaaataaagggaaggcatacaaaagagcaaaattttaaagctgggtgttggggggagacatcacatgtcagcaggttccgtgatccctcctgagtagcaaaaccagcaagtttttattggtgattttcaaaaggggagggagtgcacaaatagggtgtgggtcacagagatcacatccttcacaaggtaataaaatatcacaaggtaaatggaggcagggcaagatcacaggactggggtgaaattaaaattgctaatgaagtttcgggcacgcattgtcattgaaaacattttatcaggagacagggtttgagagcagacaactggtctgaccaaaatttattaggaggcaatttcctcatcctaataagcctggaagcgctacgggggaccggggcttatttcatcccttatctgtaagcgtaaaagacagacgttcccaaagcggccatttcagaggcctccccttaggaacacattctctttctcagggatgttccttgctgagaaaaggaattcagcgatatttctcctatttgcttttgaaggaagagaaatgtggctctgttctgcctggcccacaggcagccagcctttaaggttatctcccttgttccctgaacaacgctgttatcctgttcttttttcacagtgcccagatttcatattgtttaaacaatttctgcagttaacgcaatcatcacagggtcctgaggtgacattcatcctcagtttatgaagaagatgggattaagagattaaagtaaagacaggcataggaaatcacaagagtattgattggggaagtgataagtgtccatgaaatcttcacaatttatgttcagagattgcagtaaagacaggcgtaagaaattataaaaatattaatttggggaactaataaatgtccatgaaatcttcaaatttatgttcttgtgccatggcctcagccggtccctctgtttggggtccctgacttcccgcaacacagcacagtgctttgaaaacacacataggattcaggaggcctctgtcttcttttcaacccctctcagctttcatgaaacagtttcatactgtcccagtggacagcccttacaggttcaggaagtggccccatgtttaatgagttttggtccttttatattcaggactcacatatagtttcgaaaattgagggtgtcaccctctgacctgttcaaggcattgtcagggcaggctcgatacccccatccatcactgctggaaaaattctgagattatgatggaccacatttgtatccagaagaggcagggtttgtgcttgggcagggaaagggataataaaggtttgtagtgtctctgcttagccagaaacctgattcctgattgtcccctgggcagcccctggttcccctaacattttatctgccagtgtctgagcctcagcaatggcatctgatgtcctagtcagtccatgcatcagcagatgtgggattgcatggtggggggcatcctctaacagatagaaagataccccaggattagagaaatggagggctcagtctggtctccagcaggacctttgttcatggatgagttcacagcagaggagacctgggaagacacatgggaagcaagtggcaggaacaggaagtggaattgttgccaggtggattccccctcccagagaaccttttgttctgcaccttttcccttcaagtctaattctgtcttttcctttgttgcaatttacagacacttggccaacctcacatgcatcaacagcaggtaaataatcctctcacccctccctagggctcactgtctctggacatattttgtgtttgaaactgataggatgaggctcaaggtgggcccctcttttttcactcccctgtgggttgcgtgggaggaaggtggaatctctgaggagccagtgctgggtctgatgtttgaggatggagggtgctggtgactgtctcccatggaatcctgttccaagtggtcaggaaagatcctcatccaggtgctcaggatgagcactggagggctccttaatcctactgggacctcgttcctggccctcaggccatgggatccagatctctgaagagcaggtgaaagtgccagtctctgcacttgtgtggccaaggtcttgccatcactggcaaattgccagaaggcagagaggaccatgcaggtgccaatgagctcctgaattcggagggggtctgggcttgtcatttgtagctgtgtatctccatcctttgtgtacccagagtggggaatggggtgtccattcctgtcccctcctctggggtcatacatgcttacccatagcttgagcttttatagacttgagtagaatagggcatcactttttccactatgacaaagtttaacctctgggtgcagctatcttccatcatgactgcatgccctggtgacttctgcattcgtattgaaacttgactactttgcccactgccctgattgttgtccatgccttatccttgacctcatatttgagatggatgaagcgttcttgtgttcccctgtaggatctgaatccagtttggccctgaggctggtgaatggaggtgacaggtgtcagggccgagtggaggtcctataccgaggctcctggggcaccgtgtgtgatgactactgggacaccaatgatgccaatgtggtttgcaggcagctgggctgtggctgggccacgtcagccccaggaaatgcccggtttggccagggttcaggacccattgtcctggatgatgtgcgctgctcaggacatgagtcctatctgtggagctgcccccacaatggctggctctcccacaactgtggccatcatgaagacgctggtgtcatctgctcaggtgggcctccaagaccttcggctccctctcctaggttggagtttgctcaggaagaaaatcctaattacattatgatctcctctgaactcacagattcttctatgtttcttgtatttatgcagccttgttagctccctgctaagaatctgtatgaattttgctacagcggttggtgttcatgtggtcacttaggacaggggaccaaagtcaaacaacaacccagactttatccccttcctgaggcagtgcaaggaagaggcagaagagaaaactgctggctccccagggctccatttcttccctgctgagtagcagtggttgagggtatcatggacataggacagacagcggggcagaggagggatcctctcactgtgaggaactctgaaccaaagatgcttgtctggaagtgggttctcagctgagacccagtgaggaggtctggaaacagaggctcaagggttaggagtgcaaaatgggtgtctggttctatcaggcctgggttgtgtgaggttggagtccttgacctcaggtcctctcagaacgctgcagagcactgccttgccctgggtctggtgtggggagggcagcccccatgagactggccaggcttggcctcattattgcctgtggtcggggcttgaagatcacacaagggattttggctggagtggcttcctcagccttgctgactcaggaacacctaagatgtgcaagggagtgggttggtttaggtcaactgggttaccctgcgcagacacaatttgatctcctcagagctggcaatagtggacaggatctgcctcaaccccttacacggtgcatctctgtggggatgtgcatggcaatgtccctccctgtgtgataggaactaggatggactgagtgtcagactcgcccatttctttccctcctcattccagttttgtcgacttctgtgtaacattcctgatctgaccttctcttctctttctcacagcttcccagtcccagccgacacccagcccaggtaagttcccagtgtccttcctcaaaatgtcccttctctttctgcccaatcaccccttccccactccacagagctctcctgtttctctgtgtggatactgtggggcatattatttctaccgccaccaccggctgtatttcacatgggtccttttctattttccctaagtgtcagccggtctgagaaataaagggaaggcatacaaaagagcaaaattttaaagctgggtgttggggggagacatcacatgtcagcaggttccgtgatccctcctgagtagcaaaaccagcaagtttttattggtgattttcaaaaggggagggagtgcacaaatagggtgtgggtcacagagatcacatccttcacaaggtaataaaatatcacaaggtaaatggaggcagggcaagatcacaggactggggtgaaattaaaattgctaatgaagtttcgggcacgcattgtcattgaaaacattttatcaggagacagggtttgagagcagacaactggtctgaccaaaatttattaggaggcaatttcctcatcctaataagcctggaagcgctacgggggaccggggcttatttcatcccttatctgtaagcgtaaaagacagacgttcccaaagcggccatttcagaggcctccccttaggaacacattctctttctcagggatgttccttgctgagaaaaggaattcagcgatatttctcctatttgcttttgaaggaagagaaatgtggctctgttctgcctggcccacaggcagccagcctttaaggttatctcccttgttccctgaacaacgctgttatcctgttcttttttcacagtgcccagatttcatattgtttaaacaatttctgcagttaacgcaatcatcacagggtcctgaggtgacattcatcctcagtttatgaagaagatgggattaagagattaaagtaaagacaggcataggaaatcacaagagtattgattggggaagtgataagtgtccatgaaatcttcacaatttatgttcagagattgcagtaaagacaggcgtaagaaattataaaaatattaatttggggaactaataaatgtccatgaaatcttcaaatttatgttcttgtgccatggcctcagccggtccctctgtttggggtccctgacttcccgcaacacagcacagtgctttgaaaacacacataggattcaggaggcctctgtcttcttttcaacccctctcagctttcatgaaacagtttcatactgtcccagtggacagcccttacaggttcaggaagtggccccatgtttaatgagttttggtccttttatattcaggactcacatatagtttcgaaaattgagggtgtcaccctctgacctgttcaaggcattgtcagggcaggctcgatacccccatccatcactgctggaaaaattctgagattatgatggaccacatttgtatccagaagaggcagggtttgtgcttgggcagggaaagggataataaaggtttgtagtgtctctgcttagccagaaacctgattcctgattgtcccctgggcagcccctggttcccctaacattttatctgccagtgtctgagcctcagcaatggcatctgatgtcctagtcagtccatgcatcagcagatgtgggattgcatggtggggggcatcctctaacagatagaaagataccccaggattagagaaatggagggctcagtctggtctccagcaggacctttgttcatggatgagttcacagcagaggagacctgggaagacacatgggaagcaagtggcaggaacaggaagtggaattgttgccaggttgattccccctcccagagaaccttttgttctgtgccttttcccttcaagtctaattctgtcttttttctttgttgctatttacagacacttggccaacctctcgtgcatcaacagcaggtaaacaatcctctcacccctccctagggctcactatctctggacatattttgtgtttgaaactgataggatgaggctcaaggtgggcccctctcttttcatgtccctgtgggttgggtgggaggaaggtggagtttctagggagtcagccctgggtttgatgtttgaggatggagggtgctggtgactgtctctcatgggaccctgttccaagtgttcaggaacgatcctcatccaggtgctcaggacgagcactggaaggctccctaatcctgctgggacctctttcctggccctctgaccacgcactgcagacctgcaagggtgggtgaaaatttctgtccctgcagctgtctggccaagtccttgccatccctggaaatttgccagaaaccagagaggaccatgtggatgccaccaaactcttaaacatggggccagcatgggcctgctctctggagctgtggagctccatcctgtgtgtgcccagagtagggagtggggcattcattcctgtcacttccagtggggtcacaggtgcttccccaaaatctgagcctccataaacccaggcagcatagtgtatcacctctcctttccctatgataaagctgaacctccggtagcagttgtatgcaattgtgactgcttgcccaggtgactctggccattaggaagtaccctgagtgtggaacttgccttagattgttgacctcctggtggggatggatgaagggttcttgtgttcccctgtaggatctgaatccactttggccctgagactggtgaatggaggtgacaggtgtcgaggccgagtggaggtcctataccaaggctcctggggcaccgtgtgtgatgactactgggacaccaatgatgccaacgtggtctgcaggcagctgggctgtggctgggccatgtcagccccaggaaatgcccagtttggccagggctcaggacccattgtcctggatgatgtgcgctgctcaggacacgagtcttacctgtggagctgcccccacaatggctggctctcccacaactgtggccatcatgaagatgctggtgtcatctgctcaggtgggctttcaagaccttgggctccctctcttaagttgaagtttgctcaggaagaaaatcctaattacattctgatctcctcactcaaagctttttctatgttttctatatttctgaagtcttgttagctctctgctaagaatctttatgaattttgctacagtacctggtgcagctgtggccacttaggccagggctccgaactgaaacaacaacccagactttatccccatcctgaggcagtgcaaggaagaggcagaagagaaaagtgctggctccccacggctccatttcttccctgctgagtagcactggttgagggtatcgtggacacagcacagatagcaggggcagggagggatcctctcactacaaggaactgtgaactaaagatgcttgtctggaagtgggttctcagctgagacccagtgaggaggtctggaaatagaggctcaagggttaggagtgcaaatgcatgtctgtttgtgtcaggcctgcttggagtccttgacctcaggtcctctaagaatgctgcagagcactgcctgtgccccaggtctggtgtggggagggcagcccccatgagtctggccaggcatggccttgttattgcctgtggtcggggctgtaagatcacacaaggcatttgggctggagtggcctcctcagccttgctgactcaggaactgccaaaacatccaagggagagtgttggttttgggtcaacctggtcaccctgggcagacacaaagttactcacctcggagctgacaatagtggccaggatctgcctgcaccccttatatggtgcatctctgtgggaatttacatggcaatgcccctccctctgtgatagggactaggatggactgagtgtcaggcttgcccagttccttctatctttgttccagttttgccattttctgtatagtgcatctgatctgaccttctcttctctttctcacagctgctcagtcccagtcaacgcccaggccaggtgagtccccagcatccttcatcgggatgtcccttctctttctgcccagttacctcttccccactccacagagctctcctgcttttctgtgcggatactgtggggcatattatttttcctcccaccactctgtaactgagaccccagcatagtgcttcaacagacatagggttcaggaggcttctgtcttctgttcaatttatttcaggtttcatgaagcagtttcatactgtacaatggacaagccttacaggttcaggaagtggcctcatgtttaatgagctttagctcatttatattcagagctgatacaacctttctgagaattgagagtgactgccaaagtcacctgggaaggcaatgtcagttcaagccttaaacatgacttctgccatgggcaagcaatgtcagtgcaggcctgatacctccgtccctcactccttcaaataccccagattttgcaaggccatatctgcatccagaaaaggcagaggccatgctcgggcagggagagggataataaatatttctggtgcctccacttatcaggaaacttgatacccctttgggcggctccttggttcccctaacattttagctcgaactgtcagagtctcagcaatggtgtcacatgtgcccatcagtccatgtgtcactggatggggcaggctaacccttcgtagctgagaagaggacatctcacacttcagaggtaggagggatcgaactggtctccagcaaggcctttgttcctggctgtgctcactgagctgaagacttgggtagcacttggagcaagtggcaggaaccagaaattgaatagttttcatgatgcttgcctggttcagagatttttttttgtagctttcctccctcaagtctaattttgtcctttctctttgttgcaatttacagatacttggctgaccaccaacttaccggcattgacagtaggtaaataatcctctcgcccctccctagggctcactctctacctctggacaaacgtttcttttgaaaatgaaagaatgaggctcaagctggcgcctctgtttttcatgtttccgcgagttgcctggggaggtagactccctgggaacctagtcctgggtcagatgttggaggctggagggtgctggtgacctgtctcccctgggattctgttttatgtagtcaggaaagatcctcagccaggtgctcaggacaagccctggagggctccctaatcctactgggaccttgttcctggccctcaggccacaggctgcagacctgcgaatagtggggaaagtgcctgtccccatagctgtctggccaatgtcctaccattcctggcactttgctagaagccagagaggatcatgtgggtgccaccaaactcctgaacgtgaggcaggtcttggcctcctatctggagctgtgcagcttcatcctgtgtgagaatggagctcagaatgaggagtgaggcgtccattcctgtcacctccagtggggtcacaggtgcttccccaatacttgagcttccatagacttgggtggagtaggacatcactgcttcttccactatcatgaagctgaacctctgtctgtattcatattcaaaggtgattacctgcacacgtgactttggccattaggaagtgccctgagtgtggaacattccttaaatccttgacctcataatcagtatggatgaagggttcttgtgttcccctgtaggatctgaatccagtttggctctgaggctggtgaatggaggtgacaggtgtcgaggccgagtggaggtcctgtatcgaggctcctggggaaccgtgtgtgatgacagctgggacaccaatgatgccaatgtggtctgcaggcagctgggctgtggctgggccatgtcggccccaggaaatgcccggtttggccagggctcaggacccattgtcctggatgatgtgcgctgctcagggaatgagtcctacctgtggagctgcccccacaaaggctggctcacccacaactgtggccatcacgaagacgctggtgtcatctgctcaggtgggccttcaagacctggggctccctctcttggggtggagtttgctccagaagaaactcctaattacattctgatctcctcactcaaagcttctcctgtgtttcctgtgtttttgaagacttgttagctctctgctaagaatccatatgaattcactgcctagtgttcctgtggtcacttaggacaggggaccaaactgaaacaacaacccagactttatccccttcctgaggcagtgcaaggaagaggcagaagaaaaaatttctggctccccagggctccatttctcccctactgagtagcactgggtgagggtatggtggacacagcacagacagcggggcagaggagggatcctctccttaggaggaggctcatggtaaggaaaggacatatgttggggtagggaattctcacttgaggccccagtaaggagcatttggattggaggcatatgggctaagagtgcaaacgggtatctgtgcatgtgtgacctgggtcttggtcagtttcagctccttccaaagaactgcagtgcattgtgtgtctagcaagcatggtgttgggagggcagctcccatgagatctgccaggcaaagccttgttattacgtgtggtttgggatggaagatcacacaggggatttttgctggagtggtatcctgagacttgctgacttggtgaattgctaaaacctgcaagggaaagggttggttttggttcaattggacatcacatccagacacagagttaattgccttggagctggaaatggtggacagaatctgcttggatcccttataaggagcgtctttgaatccagccaaagcactagcattcagcaggtctgggtgaaactcctgggtcttgcttgaagcctctggccgctccctacctcaatcaatgtggtatctaccagttgtcaattgatctttaaagaggatctattattagggatgcttttgtttgcacatggcaggaactcaactcaaacactcttaagctagaaaggaattcattgtctcagttatccagaatgtttagtggtggatctggagcttcaggtacagctggttccagaagttccaagtcttttttccccatgctttgcttacatctactcttttatctgtgtgggcttcactatcaacttgctttttgcatgtggctgagagacagcagtgggcagccccaagtctatatcccaccaggagaaggagtcagtctgtcccagtacctctggctgacaaggcctgggaggactttgattgacctgcttgtaaacaggtgctttcttccaaaccatctctattagctctgacggctcagccagagttctatacccatctttgtgttcctttggggcgacgggaaggatgggggcactaggctctacttgaatcttgtaggatgctactttttaaaataggaatgactgtttctattagaataaaaaacaggcaggatgtttgtgacagagatagccatccctcagttggacccttcctttcttttgatactatctgctctttgctggttgacgttacccctctatcctgagatggaaccttccctctccctggctgttgcccatgttcattaccatcatctctatctagttccaggactttttcattatccccaactgaaagctcttaccccttaaccattcataatccatttctctttccctcagcccctggcaaccactaatctgctttctgcctctgtatacagattttactaagaattgtggtcactttctatgaatggaatcatagccttttctgtctggcttcattcacttaacataatgttttcaaggttcattcatattttagcatgtgtcagaactccactacttttaactgccaactaatattccattgtatggctacgccatctttgtctatccatttatcagcttatggacatatgggttgcttccatcttttggctgttgtgaataagtctgctatgagaattagtgtacggttttttgtttgcacttgtgtttccaattttgggagatatatacctaggagtgggattgctcggtaatagggtaattatgtttaatttattgtggaaacactgaacagttgccacagctgctgcaccaaatttgcattcccccaagcaatgcctgagaattctgattcctccgtatcctcaccaacacttgttatgatgtctttttcatcatggccatcctagtgggtgtaaggtggtatttcatggtgttttgatttgcatttccttgatgactaatgatgttgagcatcttttcatgtgttggtgggccctttgtatatattcttgggagaacaggggcttcattttatagatactaagctgaaggccagaggaactagactaatgtcagtatcttagcccaggctcacaggacagggttcaggtacacagagggatcaggatgcctggcccagtgttgtgtctagcatgtgacattccttcatggaggcctaactctgccattttttctccattctcaggcataggcactgctaggtatgcacaactaagtgtcctcatagttgcttctgcccactgtccctgtagctcatggtattcagtaggtccaggttttgtttcagattgaaggcaagctgtgggtttgaaagtgactcaggaataagcctcgggcctgatggggtggtccctgtgagcagagtgagtcagccagaggtggagaggtggactctcccaagaaccaggtcctagggctgcaccttgccaggcagctgggagctggtctcggttgcatcctgctgcaggggcacttgagcccagtggtccctgcagatccatgctgatggctcctgcactttaacctctgaatctgaaggcctggctcagcacttgaattgctggtcactggggtaactccatcagagaacatgcacagctcagtccacacccaagggttctagaaaacaacccttaagttgatgaagaacatcaacttaaaatgatgaagaacaggcttccgtcaatgtctatgctgctggagaacattaactggagacccagaaaccttggccttctggaagaattctgaacttcacttgacctcagatcctcttcctttaggagatacaggagagagttaattttcctgtcttttctagaatccaattctggtttggccctgaggctggtgaatggaggtgaccagtgtcagggccaggtggaggtcctgtaccaagtctcctggggcaccgtgtatgatgacaccaatgacgccaatgtggtctgcaggcagctgggccgtggctgggccgtggcattcccaggaaatgcctggtttgatcagggctcaggacccattgtcctggatgatgtgtgctgctcagggaatgagtcctaactgtggagctgcccgcacaatggctggctctcccacagctgtcagcacagtgaagatgctgtgtcatctgttcagatgggcctccaagaccttgggcctctattttagtgtgtggttttctccatgacaaggcttctctttgcactggcctcttcccagcctgagcttctcttcaagatggccagtttctctgatacctcagcaaggcaataacctcagcaaatgttgttggcgtctttgaattttatgggtaggcactagcttctttcttatgtaggttcctatagcaaacaagggttcaatctactttcaggctgtaagaatgaattcttccaacatctttttttgagactaaccgttaaggtttatatctactattccactctcctggatgactcttggggagcatttctaagtgatgagatggggacaggcactcagcatttctctcgctcatcatcctgggcactgggactgactcatgttttcttcttttccttgcagccacccaaataaattctactacgacaggtgagtctgctacaccccagtccagcaatatttctcttgggaattccaccctctcttgtttccagaagtaggaggagtagggtagactccccctgggggggtaatttctctctgaggactctgatctttgttagggtgacgagctgagttcccactgccatcactctcatgtctggttcaccgtggagggcccctgtggcctcctgctattgcctgctgatagtgctaagtgctggcagagatgctgctgtggaaggaggctttggtcctcccattatttcagatgaaaataactgtctaaattaacccatggaaaattaggaccttcattttagaaacatagccaagtaatacttctgcacgtatttgtcaaataaagaatactttcactttgagggagccatccgcaaagcgtttttgtgccacagtgaaaatatcctgggccaaatatgttgggaggtgctacatactctagaccttactggccatgaacagtgtaaactggaatggtcaaggctctgagaagtcctgtactaaggaaaaggatttaactttgtcagtcaaacaaattactatggaatggaaaaattatctactaaaatcctaaacagcttcatttttttttctagattggtggcatccaacaactacaaccactgcaagtaggtatcacattttctacctgaaccataggtcatacatttcttatccccaagcttggctatccatgagcgaatgctctgccccaccccagccttcctcaatctgcacatagccctggcctgtcccactatacccttcacctcttcatttgaatcaatgagataagtattcttaaaataatagacttaaaggcttttattttggggggtatctccaaagctttaggaggaagaagggagacaaatagtaaatggataattttactacaaattatgcttttccatgtcatttttatttcaccatatggctatgtttcaatagattttcattgcttttaaaaaataatagggatacttttctgtgttattaaatcttttctcacaatcattttaagtccctgtattgtattctattatacagatatgccatgaattatttgacaaatcatcagatgctagatatttgtttgtatttcttcattactgtaaatgattttgtgatgaagaatatttttatagataatttttttgcatacctcactaatttttcctttaggatataaatgggtttactggaccaaagtcaatgtcattgtagtgcctggtacatagaatgtacttcatgcatattaacttttactgtgttaggtattttaagatcttgctgtgtgtatggtcaaactaccatcaagaatggttgtaaaattatggaatgatgtaagagacaaactgatcttcttcctcagagctcacaatattattttgtacacaacaaactagaaaattacagttgtgacaactgtttccaaggaaaagttcagtgtgcaaagaggaagtattagtagagatcttccttgattggggagttaggggaagttccttatggaagtgacatttaagctgggagttaatagaggagcaggttcatttgctgaagtgtcttctaaccagaagggatgctttgaaggccctagggtgggaaggagcttggctctttgaaggagggtggggtgcgggcaaggagggactgcaggaaatctgtcgggtgaggccagatcattcagggccttgtgggtgggttaagactcccatctttatcctaaaggtagggaggctgcagaaagattttaatcttgagaattagctaattggaaatatatttgcaaaagatcatgtttatcttttctgccaaactgcatttcctgaaggcaggggccatgtctgcctttttcataatgtatccttattatctagcattgtgtctgcctttcaagaactgtttattgaaggaataaatgagtgaatgaatgaatggataaattaatgaataaatacataattactgttggcattttggcatacattccatacactgtatacacacacacaaacacacacacacacacagtatggcatgctttatatcccattgtataacccatcattttcatttaagtgtatataatacttttttcatgaccttaaaattagcatttttataacattgaaattatttgtatagaagaaggtttaatgactatatgattttccactgtatagatatatcatcatttagttaaacggttactaattgtggggcaaaaacattgtttccaattatattttataatgttaagtgactatatacaatagcatattttataaccatttatatttaatgattagaaatatgtaactcgtatccttgtctctgaaagtttgactttatccttaattatttcccagtgtagaaatagaaagggagggcaggccacatgatcttcaagaaacactgtcttcccatcaaatgggagaacgtatttctatctcataagggacttgtatctaggatatataagtgactcttgtagtcaatgataaaaagtcaaataacccaactgaacaatgagcaaaagacctgaaagatatttctctacagaagattcacagatagcagagaaggcattggaaagatgctcaatgtcattagccgtcagggtcatgcaaatgaaacacccagtaggtgggctgtagtcaaaaagccagataatagcaagtgttgatgaggatgtggagaaattggaaaccttatgcacggctgcagggaatgtaaaatggtacagccactttgagaagcagtttggtggctcctcgaaaggttagacctggagtcaccatatgacccagcagttgtattcctaggtatatacccaggagaaatgaaaacatatgtccatacagaaacttgtatgtgaatgttcaggacagctttattcatagtagccaaatgtgaatgcaatgcaaatgtccatcatggtgaatcgagaaacaaatatgatatgtccatgcagtggagtattatttggcaataaaaatgaatttaatagtggccgggcgcggtggctcatacctgtaatcccagcattttgggaggccaagatgggcggattggctgaggtcaggacttcgagaccagcctggacaacgtggtgaaaccctgtctctactaaaaatacaaaaattagctgggcatagtggtgggcggctgtaatcccagctacttgggaagctggggcaggagaatcgcttgaacccgggaagcggaggttgcagtaagctgagatcgtgccactgcactccagcctgggtgacaagagcgaaactccatctcaaaacaaaacaaaagaaaaaaaagaatttaatattgatttatgctacaacatgatgaactttgaaaacacattgagaagtcagtcaaaaaaactaccatattgtacaatttgttttatatgaaatgtccacaataggcaaatctatagagacagaaaagtagatcagtgggtgccaggaatggagggtgttgagaagaaatggggagtgattgctaatgagtacagggtttctttttggggtgatgaaaataatctaaaattgactgtggtgatttcagagctctcagtatgctaaaaaccatggacttatccccttagaaaaagtaaacaaagagttatgaaaaagaaaaaaaaagacgttttaatttctatcactgagtgtgcacatgtttttaaaaagtttttattactataaaccaaccaacaaaatgtttgaccacttaatatttatccttttctgataaataacaatagctaatattgctgggtgcttatgtgcctggcactctctaagagtttatatagacatagaaacctatcttatgtttatgtataaatgttcatatatacatatcttatttaataccctcatcagacagatgaggcagatgccattaccactctcatttttctgatgaggaaactgaggcagagaggttaagtaactggctccagatcatggagctgatagaggcagagccaagatgcaaacccaggcttcttgttgcagaaaccctgctcctaacccaacgttgtgctacttgtgaattggcagagtcctgtgctcatggaagacgctagggaacacactgtgttatggagtgctctccacgggtcagcactgtgttcagccaggactatcccacgtccctgtctgtagctgattgaacaatgatagctgtcactttgttgctttcttggcatttttgctagaggtgacacatgctccctctgaagcttgggtcacctcctcgcagagggttgctgtccaggcctaacagggaaagcagggacttgaatcaaagcttctaatgttgggccacctagaaccaggcccaagagaggggacttgtttacagggaaagttaagtcttgttataaagtgcagaagatgaaactggatgatacttacacagatgattccttgtcacaaaatacctgaagacctggtacaatggagatgtcccctctctcctctctaggaccctcttcaaattgtggtggcttcttattctatgccagtgggacattctccagcccatcctaccctgcatactaccccaacaatgctaagtgtgtttgggaaatagaagtgaattctggttatcgcataaacctgggcttcagtaatctgaagtaagtaatgcctggtcatctggtgaggggtgagttcctctgcagcacacccactggtttagactgtgtcctgggctgggatgcttttcactctcatgtgccatggacaagcttttggtggctttgattcctaccataaagcatcagggaacactgatgtcctttgacttaattgaggaagagctagaagaaaaacctgtattcaatggcatccctcgtaaagtgcaaactatttataaaatggaggggcaataggaatttcaatgttgacttgaatacattttctccatacagattggaggcacaccataactgcagttttgattatgttgaaatctttgatggatcattgaatagcagtctcctgctggggaaaatctgtaatgataccaggcaaatatttacatcttcttacaaccgaatgaccattcactttcgaagtgacatcagtttccaaaacactggctttttggcttggtataactccttcccaagcggtaagtgcacactagaccatgcctatgaggcttggtggatttacccagctgcctctttgggggcaccatggttccccaaggaaatcaaagaagggcctcagcgatgcacggcccattctctttctcttggcactgactgtgtgggcaggcccttgggaaggcagcaaagggtgcagactgggggttccacctggccttgggtctgccaccaactctccaggggacctggtgactctccttcagagccacccctctccgtctggaggtgaggggatctgagcttggcgatgtctagagcccctttcagctctgcatggagcggtccagtacctccaccccagcttttccacatttctatttggcgactttagaggtgggaaaaggcctgtgggatgcttggcctttgaggtttgttgtgggacatttgttgtgggacatggccatgatctctcagttaatgtgtctttcagatgccaccttgaggttggtcaatttaaattcatcctatggtctatgtgccgggcgtgtagaaatttaccatggtggcacctgggggacagtttgtgatgactcctggaccattcaggaagctgaggtggtctgcagacagctagggtgtggacgtgcagtttcagcccttggaaatgcatattttggctctggctctggccccatcaccctggacgatgtagagtgctcagggacggaatccactctctggcagtgccggaaccgaggctggttctcccacaactgtaatcatcgtgaagatgctggtgtcatctgctcaggtatggcccaatgccatggaaggcccatttcacctgtaacttgctataaagcaagagcttaaggccagtggctgatggtgtctgtggcccaggcaggagctggtcattgtgtcctcgtggcctgcgcactccagaagagcatgcagggggctgctttatctttggccagtttctggacccagggccattatgctgaacactcatctgactaaaggacctccagcaatgattttacttctttatgcttcagtttccttgactgttgagtcggggtggctatgatagtacttgctactggtgacaattgggatggttttagaacaatcatggtcaaggagagagtgatgggtgttatgacctcagctgtaatcctgatgaccacaagtatgacgggacttagggagcatctggggaagctgggaaggcttctcaatagcaattgctgggtggacctggggaccctcgccgaggggggtcaggttatgggccatgtaagtgtatctctgtctcattccggcccctcctccaagccacatgtctgtgacctatgctttttttctattcctttttcaggaaaccatctatcgacacctggtaagtccctccgatttccattccacttccctggtctccaggtctctccattactgctgcctagactgtgcagggcatgttgctcactctccaaggagttcatctgtggtaccatcctctacagcccctgtcccctcccctgccggccaccaggatagtgtgcccctctctgtgcttcagtggcctgacccacctaagattaggatctccagtcagtcccgaggtgaggcccgccacctgtcagatttgactgtcctcacagacaccagaccctgaccagtgttggccaaatggggcccactgcatcgcagagctcctccctgcctgcccctgagctgctctgagtgttcccagcatggccctggcacctctccaacaccccccactgccccgccccctgcttgctttgtcatcccctcctggcctcccatagcagcagcttcaggcctgtgccctcccatccattctccactgtgcagccccttcaagagattcctcagggtcttctggtgatgaccccgctcctcagcacagcatgactgccagggctccccatgatctgctccctatgcttggtgccctctccccatcctctgcctgctccatctacacggaggttcccaaatctattccacccaggtgcagttgcacctgctgttcctctgcctgggacaccccgtttctacctctttgcctgccccctaattactgcccttttttccccactccatctggggcaggggccagacttccaggctcctctccttccccaggctttggtcaatctcatccttttcccagtgtgctgggattcgctctcctccagacctccccaaaggcaagtgagctccccaagggcaaggcctgtgtccagctcctccctgtggactcaggcttggcacagcatctgcacagctcatgagcagtcgacagctgtgtcagggatgccagaaaactgatcctgatcttttctttttgtcaacagctccttttctcaacatcacccgtccaaacagtaagttctgagctccctgacaagtctgtggcagagtggcctggaaattccccttcccatttcctcagtgacaatggggctggggaggagatggcttcccccaaagtggtctccctgcaagagtgccctgccagccctcagtggacggtccagatctaggccacctcttgctcttacttggtttctgtcttgggaattattttataaaattttaaagtaatttaaatttaaagtagtccgcaggtagactgtgcagtgtgctctgggggtcaccgacattcccactttttgtcctgacagcagattattcctgcggaggcttcctatcccaaccatcaggggacttttccagcccattctatcccgggaactatccaaacaatgccaagtgtgtgtgggacattgaggtgcaaaacaactaccgtgtgactgtgatcttcagagatgtccagtaagtgtgcgcccagaagaatgccttggggccccacagacctttcaagagggaataaatggtgcttaagtgtgcgcccagaagaatgccttggggccccacagacctttcaagagggaataaatggtgcttagaaagccaggagagaagtttgctgagagacatttttgacctagcccagaggcatcccgtggagagttggggagggggcacgagagccttggagtggacaaaagctctggtttcaagtcctaggtctttcaccaatttgctgtgtgaccacaggaagtcactcaactttcctgagcctcagtcaaaagaggggaataaaatacctgctttcctcacctcactgtttactgggaaggtcacgagaaacagagaggagagagagggagagagatgtgaaaatatttacaaaatgttgtccagtggaaaagatggttgttaagtagtaatgatagacttaggggcaataatagcactaataatcctattaacaaccacactggccaggtatgctgcctcagggttgtaatcccaacactttgggaggccgaggcaggaggatcacctgaatgcaggagttcaagaccagcctgagcaatatagggagaccccccatctctacaaaaaagtacaaaaattagctgggtgtggtggcctgcacctgtagtcccagctactaaggaggctgaggtgggagaatcgctagagccctgggagttgaaggttgtggtgaactatgatagcgccagtgcactccagcttgtggaacaaaacgagaccctgtctcaggaaaacaaaacaaaacaaaaagaacaattgtatctgttttgtggaaccctttttctccacccattcctttcttcatgtgagttccccaggggtcgggcagagatggaggaattgctgctccagagggtagggtatctgctctgcatccaatcataagtagaaatcatcgttttaagcagagaggacattactaaaagcacttttctttctttctttctttctttctttctttctttctttctttctttctttctttctttcttttctttctttctctctctctctctctcttctctctctctctctctctctctctctctctctctctctctctctctctctttctctctttttctttctttctttttttttccggacatggagtctcgctctgtcacccaggctggaatgtagtggcacggtctcggctcactgcaacctctgcctcccgggttcaagcgattctcctgcctcagcctttcaagtagctgggcttacaggcacacgccacaatgcctggctaatttttgtatttttattagagacggggtttcaccatattggtcaggctggtcttcaactcctggcctcaggttatcctcccacctcggcctcccaaagtgctgggattacaggtgtgagccaccatgcctgatgtcaaaagtacattaatatatgatttatccaaggaggcgggtggcccagctaactgtgaagaggcaccagtgtttgctagtgtcctgaacaaggggctacactaatttcttctctaacagccactgttgaacaaaatagttttccctgttgatttctgtttgcagtgggctttggagtctctgctttagtgattcatttgggattttgcaaaagatacatcattttattctctttgtcattacaatacaaagattgcacttaaagctgatgcagtcctatgggaaaaggttgaccatgactggttctttaaccagcatcttgatagcaatgaccatcaccatttgtgacattttacaaagcccttttctgtatgttgttttatttgagcttcaccatagccctcttcagtgtgcatggatcagattactttgcctttgtaaataggaaaagctttagagagattatttgacttgcccagtatttatttattcaattatttatttctctcactatgaattcatgcatattgattttattctgtgggggcactagggacttttcgatggaagaaaaatggtctaaatcaggatgcgagcccttcctttcctgatgtaaagggctgacaggtgaggggctgtagatttcatatgtgtgattgcaaagggcaggactaagacccaggcatggaggttgagggaagatgagactctcttgatttaaggatacctatgactttcttttgtttcaatttttatttttctttttattttttgagacagggcctcactctgtcgcccaaactggagtgcagtggcacgatctcggctcactgcaacctctgcctccttggttcaagtgattttcctgcctcagcctcctgagtagcctccctcaccctacaggcttgtgccaccacgcccggctaatttttggatttttagtagagacagggtttcaccacgttggccaggctggtctcgaacttatgacctcagatgatccacctgccttggtctcccaaagtgctgggattataagtgtgagctactgcgcccagccaaggagacctatgactttcatcgatgaactttgtcagagtttctggcacagaggtgtgaccccaccctgagatctgaccccctgcgtcaaattctgggaggaaatgaagccaaatggtgtgtcctctctctgcaggcttgaaggtggctgcaactatgattatattgaagttttcgatggcccctaccgcagttcccctctcattgctcgagtttgtgatggggccagaggctccttcacttcttcctccaacttcatgtccattcgcttcatcagtgaccacagcatcacaaggagagggttccgggctgagtactactccagtccctccaatgacagcaccagtaagtccccttgtggaaatgctctgttgggactggggacatcctgagagcatctgtggctcaactgtcctgttgttgtgaaataagaaatgaaggaaccctttcaggtcaccagggcttgattttcagctgaaagggaccaggagcagtgggacttgggactctggctgcccagaaataaagtcagggctagaactggctgatgggtgatgattggtcttactgtggtcagcagagactaagtagagggtcccagatgatgctcttcgtggagagtgatgagtcagtgccaaaggcagaggtgacctcttggcttgaaaccttgtgaccttctcagagtgtgggacactgtggccatggcctgagacctaacacatttggtttctatctgaagatggactgagctgggtggctggaagtggctgagataaggtcactcagacacttccagcagagcctgtatggccatgatttgagttgctgtatggactgatatgtagaatggccaagggccaggcaaggtgacatccagggtctcttatgcagtcaggattaaagactgacttgcttcatggctaaaagaccttgtttcatgacattcccacaatttgatcatacagttactttactttatagataaatggtaacttggccaaacataccacttatttaaaaatcctgcctccaattctccatcagagaaatcctgagtccacgtgctctccttgggctttcataaggatggggctgacttgaccctcgggtccttgggggattgcagtgaggtctatgcccacatcctaagtgctgaccctccctgtcagccaccctggtctgtgcactttttaagtggaaacagcctctggccccgtaggacttgtggagtctggggcagtgactgagtgccttatctgtccttgtctatcagacctgctctgtctgccaaatcacatgcaagccagtgtgagcaggagctatctccaatccttgggcttttctgccagtgaccttgtcatttccacctggaatggatactacgagtgtcggccccagataacgccgaacctggtgatattcacaattccctactcaggctgcggcaccttcaagcaggtaagcctggggcttcccattccatttcccagtgcacaagctttcttagagcggtatgtcctgtgcttcttgaattctggggatgaagaaattatgattttgggataatcaggacataattggaataaaggaagataaaaaacctttggtgctatgatatggctgcagctacttccaaataggaagaaggaagctgagcagaaagagtatctccagctgtgtccagcagagagggcttctggcagaccgccactcccatcagcaataacaacagcagctcctggagcagctccagattttgcagggcctgaagcttatacagttagggttgggggtgagaggcaggtgttgagatgggcaggggcctcattaagtcaaagaatgcaatatctatgaacttttataaactttgcaaaaacgtatggctgtgcaaacacattgctaggccttggaggaggcctgcacattgcagtaggcagggaagagggggcccaaaagcttcagcttcattagctccatagtcagctggcctctgcagctaccatttgttgagctatcaccatctaagatggccccctgcatccaattttgggtgaaagtgaagccaatatggtgtgtcccttctctacaggcttgaaggtggctgcaactatgattatactgaagttttcaacagcccctaccaccgatttctgtggtttgcctgggactttgcagattttagcatagaaagtcccacgttccaggaaacccctcactcccaggcaaatgaggacggttagtcaccctacaagtggcagatgctgtgattggtccttgtcatactcccccagtgaaggcctggccttaattgtgttgggttctggcttgctgtgagtttggtcagtggaagtcagtccactgaaggtgaccattgttcctatgccaagtgagcagcctggagactccctgagcggccccgctgagggcccttcacacccattcacacccattcacactcgttcacacccattcacacccgtttggagcggccagacaactctgtcagccctgtttcttctaacttggctgatcatgaatagcacacgccacattcttattcctccactcatttatttatttttattttattttaattttttaatgacaggttctcattctgttgcccaggctggatgcccaggcaggggtgcatcatagctcacagcagacttgaactcctgggcttaagcaatcttccagcctcagcctccagagtagctgggactataggcatgcaccaccacacccagctaattaacaaatttttttttgtagaggtgggatcttgctatgtgtcccaggctgatctcgaactcctgagctcaagtgatcctcctgccttggcctcccaaatgctgggattacgggcatgaaccactgctcctggcctcctctatttctttaaataaccatattgcctatcacactgagtgcctcaggggcagggccaatgttttgttcatctttgcaacccccagtgcccctggtcctgagcctaagagttgatatagtattattaacagctcatacagatatcagacactgaactaagtgtgctatataacttttaaaattctcaggacaactttattcccacttaattatgaggcaacggaggcttgcagaaggtaagccacttgcccagaaccatatggccatgagctgcgggtctaagacatagaagtagggctgtgccatccatggctggagcttcccacagctccaccaggctggcctgtgatagtgaatttttatctaaaattagaactgcttcttctgaccaagaaataaatctgcactccatgttcattatttggagtggattcagaatttacctccatcgtaggcaccacaggcaaatgtgacatccatgcaaatgatcatgttaatgtacagggttcaatggaaagcacttgagagcatctttgaaagagtaagaagggtcatactgtcatgtgcgtccatgtgaaaagaccaccaaacaagctttgtgtgagcaataaagctttttaattacctgggtgcaggtgggctgagtccaaaaagagagtcagcgaagagagataggggtggggccgttttataggatttgggtaggtagtggaaaattacagtcaaagggggttgttctctggcgggcaggggcgggggtcacaaggtgctcagtgggggagcttctgagccaggagaaggaatttcacaaggtaacgtcatcagttaaggcaggaaccagccatttttacttgttttgtgattcttcagttacttcaggccatctggatgtatatgtgcaggcttgggctcagaggcctgacaaaagggtttattgcggtcgtatggtttaagtcatacggtttattgtgacaactgttggcactgaaatataaagcaaaaacaaatttttaagacagtttaaagtcagaaaatgtacgctaagagcaggtggacaaggtagaaccccttcctgtgggtcttccccagacctggacccagagtgtaagctctggcaccctgtgctggctcatagccaaaggataggcacgtgccatggccatctctgagtggttctgggaggggtggaagtcttgttgagtcacgtccctctcattcacacccaaatcagctatgggattcccttagcaggtgacatgtgcctgactctgctctcttgcctgcctctcctaggcagacaatgacaccatcgactattccaacttcctcacagcagctgtctcaggtggcatcatcaagaggaggacagacctccgtattcacgtcagctgcagaatgcttcagaacacctgggtcgacaccatgtacattgctaatgacaccatccacgttgctaataacaccatccaggtcgaggaagtccagtatggcaattttgacgtgaacatttccttttatacttcctcatctttcttgtatcctgtgaccagccgcccttactacgtggacctgaaccaggacttgtacgttcaggctgaaatcctccattctgatgctgtactgaccttgtttgtggacacctgcgtggcatcaccatactccaatgacttcacgtctttgacttatgatctaatccggagtgggtaaggagtgtctttatgcgatggccttaaacctttacttgataactcaaacatgagtagccccaaaggcttgaagaatgcaaattttgatgaactgcagttcccagtacttccagcttaactggatccctttctacatgtagtgatgtcctgtagctttcacctttgaggtgcttttactctgtgttctgtatcacatccctgatttctcatcaggtaggatgaccatgtatcatctccagttaacatctggggagatgggtttctggagaatagaacagctcagcagtgttcactcagcaggttagctgtaaaccgtgatcagactctaggtgactgaactccagccatacggttaaaaagacctgcgtatagtgggaaaagcattgatttggagcagaccaaggttgaaatgccagctctgccacgtgccagttgcatgattctgggccagtgaaagcacctctatggaccagttgctcgcctgtcaagtggggataatgacacgcacattgtaaggctgttgggaggatgggatgagagagagtggatgtggcactgagcacagagagtgtgcagcaggtggtccaccaggaatgtgcactgaagatggcaggagccctgctgccctccttcagcctgggaatagaagctctgggagtccacgggttccagtcaagctcaggaggtgcagaggtcaggccagagatgtcaggctggggccagagggtgtgcaggctgggctgctctaccatagcccagcttccctggatgactgcatgtgggtgaagtggggtttgactcttctgcactcatgatgacaccatgatgtgcaactccagccccctctgaagtctctgttgatagatgtgtaccacacttcttggcttacaatatagacctggacacttcagtagccattgccttccaagagaatttataccaataggataaagagttctactaggaattagaggtgggcagattcaattcgacaccctcttgatatgctaaacgtagcacctctttccaggcacagtgtgaacatatgtcagttcagtaggtaggtgttgaggctcaccttgtttacagtctatgcagcttgctcaattcacagcagcccccttggtggctgagaggaggggagaaagcttaaccagattcccgttgtacaaatagtcataaggtgacttttgaatttgtgtgaattgattgacattaatgaaaatgagtgggtgaccttagttcttccttgccaaaggattctttctggtcaaatcctgccatttctatatgacaatgcaatttgctgggaagacggggatgtgtgtgcaggggtagatgtaccctggctatacctggagcacagggacttattggctacacctggccatcaacaagatcatccacctggaagtccattagaatgacctggggctccaaacacaccctgcccaggccctacccatacattctctgtttggcctggtggggcttgggcatgttacgtttaaaaaatcttgagtgattctgaggtggagtcatggctgtggcttcgctgtggcattctggtctgcgtggagccctgaatggcagggttttacggcaaatgcaatgactgcccaggggcttctaagtgaccctgacctttttcccaagtgtcccacctctgaacaagcctctggctatttttgcttcctcctttgccactaagggagctactgtgaaaaaaaaaacaaaaacaaaaaagaaaacttggtatttgagagaatctgggttgcctatggaggaaggaaggaggctctagaagacagaaggaggggagcagatcctggccaggttcccaggctgagccagactgccctggagaccacatccaccacccacgagaaatgcccatcctaggccagtgggccagttttcctggcttttctctttgccatgcccttcaaaatcccaccaatctataataactgggttagtgtgagctgcttcttccatcttaggaaaattcctgtaagcatatccttaggttattttccctctgacccctgctgagaggaggtgccccagggaatgaggagggggtttatatcggtataggggctcctggagggttcgcaggccagtgtggaacgtacagctgcatggggctcagggcaggctgaggagggtcaggaaagagaggccctgggagagggagggtcagggcactgtactcagagtgcagccgaatgagaccttgcctggccctgacaccaggtgagagaagggaaggtcatttacttttctgccctgtctctgggtcccgctcctgggctccaaactccagctacttccctgactcatctggtttacctgggtgcatggagcatgtggtcattgtgggattaggcctcaacccactgtgcagtatgggacctgcttgtctatcgggaaagctctcacaggctttgctgcctaaggatggcggtgaggtaccggagctgccaggatttctctgcaggcccctcagtgagtgtctgatccacacgttctgacagaaggaaggtgaggtgtgcaggaggcaggggcagtgaggacaggctgtggagttcctcacctggtacaactgagtcatgaaggaagaatcgggccttggtgagagctaaggggctactgttctcttccagatgcgtgagggatgacacctacggaccctactcctcgccatctcttcgcattgcccgcttccggttcagggccttccacttcctgaaccgcttcccctccgtgtacctgcgttgtaaaatggtggtgtgcagagcgtatgacccctcttcccgctgctaccgaggctgtgtgttgaggtcgaagagggatgtgggctcctaccaggaaaaggtggacgtcgtcctgggtcccatccagctgcagacccccccacgccgagaagaggagcctcggtaggtggtcgctctcagaccccactgtccaccggggcgcagacccctgactcggggacttgggatgttcctcttggtgtcatattccaactcagattgagccctacattgtgctgcacctggtcatacggagttgaatcagacctggttcccgcctcccccaaggctcatggtccttggaggacccgttgcagggtgaggtcaagagagttctgacctggatggcccatagacctgacgtcccagaatccatgcttctcatctgcaaaatgaaaatgtcaatacttacttcttagcactgttgagagggttacttacataaaggaattttggtgaaactgc

SEQ ID NO: 725 - DNA, 5631 bp, Homo sapiens
actcctctggccttctcttgaggctcccagttcacgctgcacagtgctgggcactgcctcctctccacacccctagcgccccccacccctcagcagaagggcccgcgaggaaccgtgcgaggtcaggccgagcgccggcaccgccaccggcactggcgctgagcgacgagagcggactcctgcgagcgcagagagggagggggagatggagggctggatgagtcacgcggataatcgcgctcttctccagcgcgcagacagcgcggcaagcgcgtatgctagcaggggtgcggacgcgtgaccgtgccgcccgctgaccccaccagtcttcgcgggcttcgaacccagggagccgacaatggcggtgagtacggccctggtcgcgcagcgaccgaacctgcgcccggttcctcgcgccccgcgctggggcggacgccgccgccgccgccgacaccactgccgccggcgtcagctcggctccagcccgccagctgcctggctggcgtcacggcccggcccagccccgcccgcgcccctccttcccctcccccgcccccacgtgcgccgagtttgttgatttagctgccatagcaacgatggaagggagcctcggggggggcggagagaagaaagggaggggcggggcatgggagaaggcggaggaaaaggctgtagcgaaggaagttataagtaaggaacgcgcgccggcggccggcagtttcccgaccagagagaacgaacgtgtctgcgggcgcgcggggagcagaggcggtggcgggcggcggcggcaccgggagccgccgagtgaccctcccccgcccctctggccccccaccctcccacccgcccgtggcccgcgcccatggccgcgcgcgctccacacaactcaccggagtccgcgccttgcgccgccgaccagttcgcagctccgcgccacggcagccagtctcacctggcggcaccgcccgcccaccgccccggccacagcccctgcgcccacggcagcactcgaggcgaccgcgacagtggtgggggacgctgctgagtggaagagagcgcagcccggccaccggacctacttactcgccttgctgattgtctatttttgcgtttacaacttttctaagaacttttgtatacaaaggaactttttaaaaaagacgcttccaagttatatttaatccaaagaagaaggatctcggccaatttggggttttgggttttggcttcgtttcttctcttcgttgactttggggttcaggtgccccagctgcttcgggctgccgaggaccttctgggcccccacattaatgaggtaggtgaggcgcgcggcgctgggagcagggaggggtgaggaccggtgggacgcgccggaacgacggccgaaagccgcccctgactctcctgtctccgctccctgccttgctcgcaggcagccacctggcgagtctgacatggctgtcagcgacgcgctgctcccatctttctccacgttcgcgtctggcccggcgggaagggagaagacactgcgtcaagcaggtgccccgaataacgtgagtatcgctccgggccgccgggaacgcccggtgggttttcgtgggtgtggtgggggcgggcggagccttggggtcaccaagagccactgaacgagggtaaggagcggccaccgcgcggactccgcaaccttcccgggatagcttccgtgtccttggctcagctgtgtatgcccgtggtgcgagcactgcggagccgcctggggcgcaagccgggtcttcaccagtccccgggcgcgctgtcggtagggcgggcgctctcgggccaccgggcgggaggtggccgcgtccccagacactggctgggccagagtgagtttagcgcgtaggcggccccgtggcgagagcgcaccgagagagcctcggtgtgccaattccggggacgtccacgggacctggagggggagggaccagccgcggcgctcgctcacacgcaattgggcagacaggacataacacccgcaatacagacgcatcacctcttcttcgacccgggagtgggccgagattgcagcgctggcgccctgggttcccgggtgcttcctgcctgaccagtccccatgtctgggcggtgcagtcgcgcgtggcccgccagcacgtcagtatgtcgggtggcaacaggggaccaccactgacaggtctctcccgccctgtccccgcagcgctggcgggaggagctctcccacatgaagcgacttcccccagtgcttcccggccgcccctatgacctggcggcggcgaccgtggccacagacctggagagcggcggagccggtgcggcttgcggcggtagcaacctggcgcccctacctcggagagagaccgaggagttcaacgatctcctggacctggactttattctctccaattcgctgacccatcctccggagtcagtggccgccaccgtgtcctcgtcagcgtcagcctcctcttcgtcgtcgccgtcgagcagcggccctgccagcgcgccctccacctgcagcttcacctatccgatccgggccgggaacgacccgggcgtggcgccgggcggcacgggcggaggcctcctctatggcagggagtccgctccccctccgacggctcccttcaacctggcggacatcaacgacgtgagcccctcgggcggcttcgtggccgagctcctgcggccagaattggacccggtgtacattccgccgcagcagccgcagccgccaggtggcgggctgatgggcaagttcgtgctgaaggcgtcgctgagcgcccctggcagcgagtacggcagcccgtcggtcatcagcgtcagcaaaggcagccctgacggcagccacccggtggtggtggcgccctacaacggcgggccgccgcgcacgtgccccaagatcaagcaggaggcggtctcttcgtgcacccacttgggcgctggaccccctctcagcaatggccaccggccggctgcacacgacttccccctggggcggcagctccccagcaggactaccccgaccctgggtcttgaggaagtgctgagcagcagggactgtcaccctgccctgccgcttcctcccggcttccatccccacccggggcccaattacccatccttcctgcccgatcagatgcagccgcaagtcccgccgctccattaccaaggtcagtcccggggatttgtagctcgggctggggagccctgtgtgtgctggccccacttcgggacacacgggatgatgctcaccccaccttcttcacccctagagctcatgccacccggttcctgcatgccagaggagcccaagccaaagaggggaagacgatcgtggccccggaaaaggaccgccacccacacttgtgattacgcgggctgcggcaaaacctacacaaagagttcccatctcaaggcacacctgcgaacccacacaggtagggggacaaactgcagaagggaggggggttagcttccagccccataggctaccagtggacactcctcagtgcctccttgacttcccaggttagcttccagccccataggctaccagtggacactcctcagtgcctccttggcttcccagggcagtctatcgccttgatctccgggatcactggagagaacagcaaaccggcgcctacttttctgcccaggagccttttgcttgatggatggtatctgtgtttgaatgtgcaattttgttaggcttttaaaaggcaggagattccccgcggtctgtgggcctctcctagcttggcattataatcaagaaattatactttgctatgcaaaagcatgatggcttttttaaaaaaatcgttttttaatgttcccttcccaggttcaccctccctttttgttattttgaattctggtcgtaacaattcggtcttacttttttattttttattttttgttcgttttgatttacatttttattttttttcccccacaagcagaaggttttattttaaattccaagaatatgatggtcaaaattgctgggaagattctgatttagggttgtcactgcagagcatttccatgtcaatgtaagtaggtacccaaagtcgtttaggtgcagcattcagtaacgtaaaggtaaagaaaaaaaaagtagccacctgtggctttttatccccagtcgtagtaggaataagattgcatggtttgggcacactaccaatcacaatttccaaatttcatttccaccactgagatgccttgactcaaatgaaacattagtataggtttaggtggtgtttgtgtgtttttggtgaaacattagtataggtgtaggtggtggttgtgtgcttaactgaccccctaaaaacaagaccaaatacttaagcacggaatgtatttctgtttatgatatggaattcaatacaccccttcagtggtataaagacattcctggatttctttaggatagggtcagagttggtttactatctggccttcagtttttaaaaggggcgattctttgatatagcaatagcgtcaattttttttttcttttacctttacaggtgagaaaccttaccactgtgactgggacggctgtggatggaaattcgcccgctcagatgaactgaccaggcactaccgtaaacacacggggcaccgcccgttccagtgccaaaaatgcgaccgagcattttccaggtcggaccacctcgccttacacatgaagaggcatttttaaatcccagacagtggatatgacccacactgccagaagagaattcagtattttttacttttcacactgtcttcccgatgagggaaggagcccagccagaaagcactacaatcatggtcaagttcccaactgagtcatcttgtgagtggataatcaggaaaaatgaggaatccaaaagacaaaaatcaaagaacagatggggtctgtgactggatcttctatcattccaattctaaatccgacttgaatattcctggacttacaaaatgccaagggggtgactggaagttgtggatatcagggtataaattatatccgtgagttgggggagggaagaccagaattcccttgaattgtgtattgatgcaatataagcataaaagatcaccttgtattctctttaccttctaaaagccattattatgatgttagaagaagaggaagaaattcaggtacagaaaacatgtttaaatagcctaaatgatggtgcttggtgagtcttggttctaaaggtaccaaacaaggaagccaaagttttcaaactgctgcatactttgacaaggaaaatctatatttgtcttccgatcaacatttatgacctaagtcaggtaatatacctggtttacttctttagcatttttatgcagacagtctgttatgcactgtggtttcagatgtgcaataatttgtacaatggtttattcccaagtatgccttaagcagaacaaatgtgtttttctatatagttccttgccttaataaatatgtaatataaatttaagcaaacgtctattttgtatatttgtaaactacaaagtaaaatgaacattttgtggagtttgtattttgcatactcaaggtgagaattaagttttaaataaacctataatattttatctgaa

SEQ ID NO: 726 - DNA, 15975 bp, Homo sapiens
cgggacggccgcgggaaaaggcgcgcggaaggggtcctgccaccgcgccacttggcctgcctccgtcccgccgcgccacttggcctgcctccgtcccgccgcgccacttcgcctgcctccgtcccccgcccgccgcgccatgcctgtggccggctcggagctgccgcgccggcccttgccccccgccgcacaggagcgggacgccgagccgcgtccgccgcacggggagctgcagtacctggggcagatccaacacatcctccgctgcggcgtcaggaaggacgaccgcacgggcaccggcaccctgtcggtattcggcatgcaggcgcgctacagcctgagaggtgacgccgcgggcccctgcgggacgggtggcgggaaggagggaggcgcggctggggagagcgctcgggagctgccgggcgctgcggaccccgtttagtcctaacctcaatcctgcgagggaggggacgcatcgtcctcctcgccttacagacgccgaaacggagggtcccattagggacgtgactggcgcgggcaacacacacagcagcgacagccgggaggtaagccgcgtcccagcggctccgcggccgggctcgcagtcgccccagtgatgccgtggcccccgaggcgggcgtcatcgggcagcgtttgcccagtgctggagggttagggagagctgcctgggcttgaccgcgcgccggtctcaaagtcctggctttggcccctcctccgttttcccctgtggaccattccgcttcgcagcgttttcaaaaactggagcgaaagtgatgtgggcggggcaaaggcggcgggaagaggagagcactgaagctggcgcgggaacttggtttcctggtggcctcccatccaatccccacgaaccagctttcctcttaaaccttgaaaagagaaattcgggagttcgagtataagttcttagtcgtcctttcctctttcctttccgacaggagcaccccaggcaaaaaatgtctcgcgggtcattggcgccaggctttcaggggacagtggggcggggcggggtgggcacaggacgttaggcagccgttggccctccctaaggccacaccgtcctgccgtcctggatcctgcgccagctgcgcgggggaggggactcgaaggtgtgtgagccaggggctgaccttgaccgctcagataaatggagcgcagccttgacacaggggtggaggtggttttgaatggggaaacccattcgtggtgaagcagattcactgtagctagcggaaaagccctccggcccacggacccatctagagacgaatacatagcagctgctgtggctgattggcgtgggacagcgtggggagttttgtctgaggagagggatccacttttctgcagctccaagcccaggggcctttgatgagccatagacctcatttttaacccacctttctgcttagacattgagcaagttacttctcatatagcttccctatatgttaaaaatggagaaaataatgcttagtaggcaattctgataaaagcaggtgcttgcaaaaatctctctgttgtctgaatataaactgtaccacaagcgagtgcggatgaacgaggactgcatttaaagataagtttttacactttcatttctctgtggctcgacacttctgatgcctccctttttgttcctgggacacatgcttggtgttgtcttcacacctttgtgacaggattagcactagtgggcagtggatgatagctcctcccttttgccacatgttcatccctgccctcgccaccatctcactgtgtggaattcctgtgtccactggtcaccggggcacagaagtgctgtctcagcctgaatcgggccactgatgggacttgcagcctgggagctccaccgtgatctctggcccactttgcgggagtctaggctttctggatgctccagggcctcacgtcccagggcagttttcttccctgaagaaagttggatggcatgatctgtcttcccatcttgaaaccgtatggcaaattgtttttcagatgaattccctctgctgacaaccaaacgtgtgttctggaagggtgttttggaggagttgctgtggtttatcaaggtaaagaagtcgctgctattagaagtcagtagtctgttctcaacacagcagccagtgagatcctttcaaaactcaaagcagccaggtgtggtggctcacgcctgtaatcccaccactttgggaggctgagtcagatcacctgaggttaggaatttgagaccagcctggccaacatggcgacaccccagtctctactaataacacaaaaaattagccaggtgtgctggtgcatgtctgtaatcctagctactcaggaggctgaggcatgagaattgctcacgaggcggaggttgtagtgagctgagatcgtggcactgtactccagcctgggcgacagagggagaacccatgtcaaaaacaaaaaaagacaccaccaaaggtcaaagcatatcattcctcaccctcaagcccttagtggctccatttcactcagtaagagccacggtccttatggtgtccgtttttcagctctgaccttagctgctgctctctgcaccagccctgctgttcttgtgagtttttgagcacaccgggacatccccactccctggaaccttcttcccccacacttggcttcttcctttgagtctctactccactcgggcaagccttcctagacctcctgatttaaaactgtgactctcccccaacctccttggtgtttctccatagacgaacatcaccatctgatgtatgtcagcctttcccttcccctgttagaagggggacagcaggtagtaaaagtgaaatgtgctgtaagctttatgagggcagaggatttgtttctcgtgttcactgttgtatcgccagggcctcaaacacagcctgccacatagtaggagtcaacatatattgatcactaaatgtagataccacctgtgttcccatgttcatataaattctagaagagtctcttcagtaacaaggtgaaccccttccagagggctgagtaggtacctcaggccggggccagagtgctgtgaagacaggcagcagcccagaccaagcttctctgtgttccgtgtcctggtctagaaccagcgatgttctttctgaccagtgctttttggaaggtggctgaggtctgggctcaggtctgggccatactagaagctgggatcccttctatagagcacttggtatggcttgtatggtcttggggcaagccagacccaagccctcttatcccattttagaaagggcttcaatttggatccagccccaggtctgccttagctctgtattcttggggtattttgttctgtattggcctatcttgactaacaatgaaccttggatttgaaacatatcatcagaaacctcagaagacaacattcttaaactggctagagcctggtctgaatggatgaaaaggagagacttttgaagcaatatgtaaaagattgagaaatgatttgttggaaatttctcaattggagaaatttctttgatttgttggaaatttctttgattctttctcaatcaaagaaaatcgggacaaactcaacaatagaaagggaggaagcaagatactcagaaataaaatgcattcccctgtttcaacttaatgcttcaattcaggattctaaggaatccttgccaggaatgtcagactcaccttgatagttggagttactccattggtgactcgatcaaatacaggagttgaggcacctgcactgtaaaatactgattagtctgatcattaggaatatcctgtatgccaggtagaagatacattgaacagattgcatgtaggcattaaattcattttggggtattacatatagacaacacatttcattaagaaacataaaactgtcagatcggtggaatacttaaaagcacttggaggtgtttagcctaaaaagcttagttgaggggaatggaagaaaagatctgggagggtggttccaaagaagggatcagactgtcctaaagccctcaggaatctgggctgggaccagcctacttaaagataggatgggcagctgggtgtggtggctcacgcctgtaatcccagcacttcgggaggccgaagtgggcggatcacctgaggtcaggagttcgaggccagcctgaccaacatggagaaacactgtctctactaaaaatacaaaattagctgggtgtagtggcgcatgcctgtaatcccagctactcgggaggctgaggcaggggaatcgcttgaacctgggaggtggagggtgccgtgagccacgatcgcgccattgcactccagcctgggcaacaagagcgaaactctcaaaaaacaaaaaaaaggatgggttccatatgggtggtgtcaagtgcccacctcctagcaagtcagcaggggccagaggcccttgtaagtggtgtctcggggggatcaactgagatggcttaggatttacctggatgcctgctctgctctccccatctcttccagggatccacaaatgctaaagagctgtcttccaagggagtgaaaatctgggatgccaatggatcccgagactttttggacagcctgggattctccaccagagaagaaggggacttgggcccagtttatggcttccagtggaggcattttggggcagaatacagagatatggaatcaggtgaggagatagaacaatgccttccatttcccgggtgcccttcctagcatgtgtttgctccgttgttttagataaggtctgggggatgagtcaatgtcacaggagctgatgtatagctttgaccttgtgaggggtggtgccaggttaagccacaattaagcctcatgaaggccgtttcacactcttttttttttttttttttaattattatactttaagttttagggtacatgtgcacaatgtgcaggttagttacatatgtatacatgtgccatgctggtgcgctgcacccactaactcatgatctagcatcaggtatatctcccaatgctatccctcccccctcctcccaccccacaacagtccccagagtgtgatgttccccttcctgtgtccatatgttctcgttgttcaattcccacctatgagtgagaatatgcagtgtttggttttttgttcttgcgatagtttactgagaatgatgatttccaatttcatccacgtccctacaaaggacatgaactcatcattttttatggctgcatagtattccatggtgtatatgtgccacattttcttaatccagtctatcattgttggacatttgggttggttccaagtctttgctattgtgaatagtgccacaataaacatacgtgtgcatgtgtctttatagcagcatgatttaatagtcctttgggtatatacccagtaatgggagggctgggtcaaatggtatttctagttctagatccctgaggaatcgccacactgacttccacaatggttgaactagtttacagtcccaccaacagtataaaagtgttcctatttctccacatcctctccagcacctgttgtttcctgactttttaatgattgccattctaactggtgtgagatggtgtctcattgtggttttgatttgcatttctctgatggccagtgatggtgagcattttttcatgtgttttttggctgcataaatgtcttcttttgagaagtgtctgttcatgtccttcgcccactttttgatggggttgtttgtttttttcttataaatttgtttgagttcattgtagattctggatattagctctttgtcagatgagtaggttgcaaaaattttctcccattttgtgggttgcctgttcactctgatggtagtttcttttgctgtgcagaagctctttagtttaattagatcccatttgtcaattttgtcttttgttgccattgcttttggtgttttagacatgaagtccttgcccatgcctatgtcctgaatggtaatgcctaggttttcttctagggtttttatggttttaggtctaacgtttaagtctttaatccatcttgaattgatttttgtataaggtgtaaggaagggatccagtttcagctttttacatatggctagccagttttcccagcaccatttattaaatagggaatcctttccccattgcttgtttttctcaggtttgtcaaagatcagatagttgtagatatgcggtgttatttctgagggctctgttctgttccattgatctatatgtctgttttggtaccagtaccatactgttttggttactgtagccttgtagtatagtttgaagtcaggtagtgtgatgtctccagctttgttcttttggcttaggattgacttggcgatgtgggctcttttttggttccatatgaactttaaagtagttttttccaattctgtgaagaaagtcattggtagcttgatggggatggcattgaatctataaattaccttgggcagtatggccattttcacgatattgattcttcctacccatgagcatggaatggtcttccatttctttgtatcctcttttatttcattgagcagtggtttgtagttctccttgaagaggtccttcacatcccttttaaggtggattcctaggtattttattctctttgaagcaattgtgagtggaagttcactcatgatttggctctctgtttgtctgttattggtgtataagaatgcttgtgatttttgcagattgattttatatcctgagactttgctgaagttgcttatcagcttaaggagattttgggctgagacaatggggttttctagatatacaatcatgtcgtctgcaaacagggacaatttgacttcctcttttcctaattgaataccctttatttccttctcctgcctaattgccctggccagaacttccaacactatgttgaataggagtggtgagagagggcatccctgtcttgtgccagttttcaaagggaatgcttccagtttttgcccattcagtatgatattggctgtgggtttgtcatagatagctcttattattttgaaatatgtcccatcaatacctaatttattgagagtttttagcatgatgtgttgttgaattttgtcaaaggccttttctgcatctattgagataatcatgtggtttttgtctttggatctgtttatatgctggattacatttattgatttgtgtatattgaaccagccttgcatcccagggatgaagcccacatgatcatggtggataagctttttgatgtgctgctggattcggtttgccagtattttattgaggaattttgcatcaatgttcatcaaggatattggtctaaaattctcttttttggttgtgtctctgcccagctttggtatcaggatgatgctggcttcataaaatgagttagggaggattccctctttttctattgattggaatagtttcagaaggaatggtaccagttcctctttgtacctctggtagaattcggctgtgaatccatctggtcctggactctttttggttggtaagctattgattattgccacaatttcagctcctgttattggtctattcagagattcaacttcttcctggtttagtcttgggagagtgtatgtgtcaaggaatttatccatttcttctagattttctagtttatttgcgtagaggtgtttgtagtaatctctgatggtagtttgtatttctgtgggattggtggtgatatcccctttatcattttttattgcgtctatttgattcttctctttttctttattagtcttgctagcggtctataaattttgttgatcctttcaaaaaaccagctcctggattcattaattttttgaagggttttttgtgtctctatttccttcagttctgctctgattttagttatttcttgccttctgctagcttttgaatgtgtttgctcttgcttttctagttcttttaattgtgatgttagggtgtcaattttggatctttcctgctttctcttgtgggcatttagtgctataaatttccctctacacactgctttgaatgtgtcccagagattctggtatgttgtgtctctgttctcgttggtttcaaagaacatctttatttctgccttcatttcgttatgtacccagtagtcattccggagcaggttgttcagtttccatgtagttgagcagttttgagtgagtttcttagttctgagttctagtttgattgcactgtggtctgagagatagtttgttataatttctgttcttttacatttgctgaggagagctttacttccaactatgtggtcaattttggaataggtgtggtgcggtgctgaaaaaaatgtatattctgttgatttggggtggagagttctgtagatgtctattaggtccgcttagtgcagagctgagttcaattcctgggtatccttgttaactttctgtctcgttgatctgtctaatgttgacagtggggtgttaaagtctcccattattaatgtgtgggagtctaagtctctttgtaggtcagatgattggcacttactgggcgcttggcactttccatactgtgtcatcggcagatagctgcatggttggtgttcgtgctggggaatgggaagttcatcggtgggacaagggacaaaatgcccccattgctttgttgtggctttaatctccctttcgaggctgagccacagcgtgctgtaggtggcgctgctgtgaagcgcagtgccagggtcacactccactcccagctctgcagaggtggagaaagaatgaaacatctcactcctggacttccactttcctgtcactgttggtgtcacctcttactggatgtcacagagcccagcccctcccacctgtccctaggaaaagcagatgccaccttggaatgtggggtttgtgtgtgcaatttactagctgggcagagaccagcaacctggagagcaggtgtctcatctaaggggacagtcacatttcacctccagccacctggaggaatttgggcctggtgatgtcagaattcttcaataaaagcctaaaatctatattttatgtgcggtcatgagatctgttaaatgttagcaacttcaggaagtttaaaaatgctgtgtggacctagaataggcaagttcttaaaggcagaaagtggaatgctagtttccagggactggggaacagggaggaatggggagttcatgtttaatgggcacagaggttttgttagggatgacgaaaaagttcgggagatggtgatggagatggtgatggtgatggagatggtgatggtgatggagatggtgatggtgatggagatggagatggtgatggagatggagatggtgatggtgatggagatggtgatggtgatggagatggagatggtgatggagatggtgatggtgatggagatggagatggtgatggtgatggagatggtgatggtgatggagatggagatggagatggtgatggtgatggtgatggagatggtgatggtgatggtgatggtgatggagatggtgatggtgatggtgatggtgatggagatggtgatggtgatggtgatggagatggtgatggtgatggagatggagatggtgatggtgatggtgatggagatggtgatggtgatgggatggtgatggagatggtgatggtgatggtgatggagatggtgatggtgatggagatggtgatggagatggtgatggtgatggagatggtgatggtgatggtgatggtgatggagatggtgatggtgatggtgatggtgatggtgatggagatggtgatggtgatggtgatggtgatgatggagatggtgatggtgatggtgatggtgatggtgatggagatggtgatggtgatggtgatggtgatggagatggtgatggtgatggtgatggagatggtgatggtgatggagatggtgatggtgatggtgatggtgatggtgatggtgatggagatgggtgatggtgatggttgcctaacatcaggaacgtgcttaatgcttctgaattgcacacaaaaatggcaagtttaatattatgtgtactttatcacaatgaaaaaagctgctgcgtgggccaagttacttgtgcaggtaagtgttctgcaggtcgttgcctgcacctcagttgtagggtgtccgtaggatgtgaggccagtccccgggcttaatgatgctttaaatcctgcctagtattcaattatttcttgtcgcttaaaaggcctaataaaattatggttttagtttacagtggtatgaatgcttagctgttggattttagtaggaaagtttgtccctttttgtttttaattttgttttacagattcacaggaatttttttttttttttttttaatgcacagaaagtttccctggacacactacccagtttcccccagtgataatatcttgggtaacatcctgtatacattcacattggtgcattcctcagagttgtcagattttgctagttttacgtgcacttgtgtatgtgtgtatttgcaattttagcacgtgtagactcttgtaaccactacaatcaagttacagaactacactaccaaggttcatctttttaaaatctttgatgttacctttttcggaacagtgaccatgagaggactttcctcccaaaattttgagaactactgaaccagaatatagtctgacactaataggtagaaatttaaccaaaggagattatgaagctctgcacttcagttaacaaatcacttctcagcttccagttccatctcagaaggaaggaaagggattaaaatccagagaccagaaatgggagcaaagtacaaggtggtgtaatcattacagaggtttcctgatgtttccaagtcagtcgtgtgttgagctgctaaactctaaagtaattttaggtggaagtgttggaaacatgctgctgaggtgatagaaaggaatccatggtcctctgttagttggaaagtatatggaatactatattctacataagatacaacactctctgtgagacaaggataaagtagattttgtcagtgaaattgtgacaagaatcgctgatgggtttagagcctaagtttgcgaggagcactggaagaaattaagattgttgagattggaaagggttagctatggggggaacaggaggaggtgactccatgacagaccaaatattcaaaggactgtgtagaagaggaaaaagactttgttagggctccagaggacagagccaggagtcagacagggccttgaactcaacccaccgagatctgcaaactttgcaggatgcaccagatgtcttgtagccatgggtcaaggggggaccctgggtaagagactgtaatagatgacctctaaggccatctcatgacatgtgtgattaatgtatgtacctgtcctctctttttgacaattctacagattattcaggacagggagttgaccaactgcaaagagtgattgacaccatcaaaaccaaccctgacgacagaagaatcatcatgtgcgcttggaatccaagaggttgaaagaaccccgtcgtcttcatttatactaaccatactcttagagggaagcaatctggttttgtgcagaggcacctgagggaggcaggaccctgggaacttcccccagccacatggttgattgtgtgacgttgggcaagtcacattttgctgcactttcaccttcagatcatgaggttgggcccagaggattttttttttttttttttttttttgagacagagttttgctctgttgcccaggctggaatgcaacggcgtgatcttggctcactgtaacctctgcctcctgggttcgagtgattctcctgcctcagcctcccaagtagctgggattacaggcatgtgccaccatgcccggctaattttgtatttttagtagagacggggtttcaccatgttggtcaggctggtcttgaactcctgacctcagatgatctgcctgcctcagcctcccaaccagatgatcttaatttgtgtatttatactcattcttacaccaaaaagggttttaaattgcctagaaactacatgtaagatgttaacattttaaatggaagcagatgaagttccagctcgctgccacctcactaacatttttaacaattatattgtaaaattcaactctaccagggtgtagagccaggtgtggtggctcacacctgtaattccaacaactccagaggccaaggcgagaggatcatttgaacccaggaatttgaggctgtagtgagtcatgatcacgccattgcactccagcctgggcaacagagtgagaccctgaatatttaaaaacaacaacaacaacaaaactctatcaggatatcataagtacttagagtgaaatacttgcatctgtaatagagacttattttttttttttttttgagacacagtctcaccctgttgcccaggctggagtgcagtggtgtgatctccgctcacggcaacctccatctcccaggttcaagtgagttcccattcctcagccccagagctgggaccacaggcgcgcgaatttttgtatttttagcagagacggggtttcactatgttggccaggctagtctcgaactcaagttggcctcaagtgatctgcccaccctggcgtcccagtgttgggatttcaggcatgagccactgtgcctggccatgtaatagagacttttaatataggagggtgtaccagaagcaccagtttcctgtggcaaacagaattattcctgctgtatttgtaatctggtgccacgaggtagcccagatcccttcagctctgatggaagagcattgcttcagccgtaaatggacacctgcagaaaccttgcaccgatggatagtctccctcagctccgtgccatcgctgcagaggctgttatggacatcactgcagcccagtggctctctctcctggtctccaccatatgagttggcttctgtttctctcctgttttactttgcctttagctgtggtctttcaaaccaccatccctccttatcttcctctgctggttcctcagatcttcctctgatggcgctgcctccatgccatgccctctgccagttctatgtggtgaacagtgagctgtcctgccagctgtaccagagatcgggagacatgggcctcggtgtgcctttcaacatcgccagctacgccctgctcacgtacatgattgcgcacatcacgggcctgaaggtgggctgtctcgggaagggtgacttgccagcctaccacactgagctcttcagttctttaatatgggaaaacaaattgcagagtttagtctctgattagcttttaaatttgatatgtgtaagtaagaaatgaaccagcttttactttgaaaccttcctcttctggaaggttttctggccctgtggtatacgcactaacagatctatacaggttgtttgtgatacagcttctatggattttctcaaaagctatgctgaggttgggtatggtggctcatgcctgtaatcccagcactttgggagactgagacaggagcaattgcttgaggtctggagttcaataccagcctgggcaacataacaagatgctgttgctacaaaaaaatggaaaagctacactaaattatttttttaaaaaaagccttgcggtgtctgcatattctaatgtttttaaatgatgttttaaagaattgaaactaacatactgttctgctttctcccccgggtttatagccaggtgactttatacacactttgggagatgcacatatttacctgaatcacatcgagccactgaaaattcaggtaagaattagatgttatacttttgggtttggtaccttctcttgataaaaggttgactgtggaacaggcatctgctcaatgctgtgtccaagataaagatgactgctccaaatgtggggcttcagtttagggagaagtggtgggcaggtgggcaggacaaggcaggcatctgcctcagcaaccatgggcacttaacatgtcaggtgctgtgaggtactaagcaccagtaccagagagggaagagccacattcaagccaggggattgtccaaaagggggcattttaactcattttaacttgaaggagaattgaagtgcaaatgtttttccttttcttttttttttgagatggagtctttctctgtcggccaggctggagtgtgccgtggtgcgatctcagctcactgcaacctccacctcccgggttcaagcaattcttctgcctcagcctcccaggtagctgggattacaggcacatgccaccacacccagctaatttttgtattattagtagagatggggtttcatcatgttggccaggctagtctcaaactcctgacttcaagtgatccacctgcctcagcctccgaaaattctggaattacaggcataagccaccaccctggccataaatattttttgttaattttacattaagtacaatatttaggtccaaacttcaaaagtctgttgaaatccctaagttatagcagccaacaattgatatgaaatggcaataaaaatgtaagttcatctgcttcatgagccttaaggaaaaaaactcagaaccagacactttttagccccttccaggttagatccaggttttaaaagttactcctttgagggagtttggctgcttttgagtggaggtgacttcaggcttattctctctggctctctgctctggtcgtttttagacatagtaataggttgtgacctgtcttcacatcctaattgccactgtctgttcatcccaggaatcctggctttcatccctttctgttcactgtccatgcatgtcatctttccttctttctgccagggacagatgggttagggattgtggaattcaagtaaacgtagagctactatgagttacagattgactgtgttcctgtctttaataaatttgccaagagtggttataagaacttacacctgatgaggcaccaggctcctgatgctgtgtaatgtcacaaaatacccctcactctcgatctgtgcaagagaacagctggttgcgctccaatcatgttacataacctacggcaaggtatcgacaggatcatactcctgtaaaatagaactttgttgatcacatcctgtgtacttgtttcacggacatgaggagcaattacaacaggtcgtacaattatggcaaaataatggccttattttgtttttagcttcagcgagaacccagacctttcccaaagctcaggattcttcgaaaagttgagaaaattgatgacttcaaagctgaagactttcagattgaagggtacaatccgcatccaactattaaaatggaaatggctgtttagggtgctttcaaaggagctcgaaggatattgtcagtctttaggggttgggctggatgccgaggtaaaagttctttttgctctaaaagaaaaaggaactaggtcaaaaatctgtccgtgacctatcagttattaatttttaaggatgttgccactggcaaatgtaactgtgccagttctttccataataaaaggctttgagttaactcactgagggtatctgacaatgctgaggttatgaacaaagtgaggagaatgaaatgtatgtgctcttagcaaaaacatgtatgtgcatttcaatcccacgtacttataaagaaggttggtgaatttcacaagctatttttggaatatttttagaatattttaagaatttcacaagctattccctcaaatctgagggagctgagtaacaccatcgatcatgatgtagagtgtggttatgaactttaaagttatagttgttttatatgttgctataataaagaagtgttctgcattcgtccacgctttgttcattctgtactgccacttatctgctcagttccttcctaaaatagattaaagaactctccttaagtaaa

SEQ ID NO: 727 - DNA, 43680 bp, Homo sapiens
tgtttggggcccgcgcgggttgcgcgccctccgccttcgcgcctcctgcccccgaggccctactgctgcccctgtgcccctcgccccgccgggcgtcgcgggccaacatgggccaggaagaggagctgctgaggatcgccaaaaagctggagaagatggtggccaggaagaacacggtgaggctgcagagtttgggccacggcccccgcccccgggaggcgcgggcaagccccggattccggggtggggacgtactggcggggcgccatgggggcgcgtacgggactcggggacccgagggaggagcggctggtgcagggcccaaggccccttggggacccttgctgagcacctcgaggtgggcgtgtgcgtggcccaggacgccagggggatcgtgcgggtcccggaggcgcgacttgtgcacgtccctttggacgtgtagggttcaccctgggcagctagtgcagggcccaggaaagcgggcgaagagagctggacgtgggaaaggactttgggagtcccagggcttggcgtgtgcaaagcccggggagcggcggcgatggcgggggcggggcggggggcaaatccgggtggcccgagaagtggcagagaaacttgggctgacgggggtactgagctgcatccctgcaccccggagtgggtctgcgggagagaagtaaaaggccgtggatcctgcgaccccaccgcttggtgcgtcaggagcggttcttttggcaattttccctttccttggccttggggtgcggcccggacgggcgggggccgaacaggtgcgggggcccgcggggcgggggaagggggccgggctggaggcctgtgcagcgagggcgagggcggagggaggagcgggctcggcgggaggttgggagcagggctgacagccctaccggagggtcctggccagagcgcagacccagctggaagttaatgtttgatcttccccgtgatctttgcctggggctggcggccgactggtcgcctggccagagcaaatttggccttgggtcctggagggcctgcgctcaccctgggagggaaaaaaagggagcctggtgagcatgcccttcccacctcccgttcctgttccagggtcctcttcctcccaccatccgtagccatgtgctgcagccacctgcatttccaggacacttaggagcctgggaaaggaagagacactaagggaagttttagagccaggaagagtagccaaggcccagggaagggtcactggaaccatgaagtggcagggagccctagagtggacactgggcagtcatgagttggtgtccatataaaggccagagcctcagtttcttcatctgtaagaaagagatgagattatctgcctctggagaagggatgtcactggattcttgtctctgctggcagcggtgaggattggagagatgagacagagatgtaaagcccttagtaggactcagacctgtgcttgctaagaactggcgaacaagacctgcttctacgcagccaggtccaacacagaaagatacagcacaaacctgcagagtgctgggagcttctcacctgacactcccaacctccatgcactccccgttccagactcctccacaatcctcagtacaactgagccacaagtcttgggggagcattttctcagctggggttggcagagcgcagccagggattctgagccaaattccagttcaaatagacgggttatcccagcccagctccttactgacccccaagcttgggccaggaaagaaattctgggcccctgggtaagaggggtagggtggggacgcctagagaccggaggagaggcaggctgcttgggatagagctctggctgaagaggacgggacctgccctggcctccccctcactccttttatggccctaggcaaaagccactcaaccttccctttctggacctcgagtttcctcttctgtgaaatgggaagaggaaatggtgtcttttggagatggattcctgtggaagtgcccagagctgtcccctgaaaagatgcaagtctggccgcagggtccctgcagcatggagccagtttacagccacgtctgcgcctgggctctcggcagtgtctgggtgggcatggagctctgggcgtctggccgagaaaggtggggcctgctctgggagtgaaagtggacccgcccagcagtggttaggcagaggaggacatacttcctgtaataagacggatcctccacgttgcagctcaggcccggggtttactgccggttgctgaagtctcagccacttaaggctttgtcacatcctctgagcatgcactaacagaagcaacttcaaacatgcaaccaagtgcctacggtcacagctacatacacacacatagctataacatgtggccacaacacagtagttaaacaagcaactgaacctaactgcgtatgagacacggctactgacaccaacatgacaagcatactgacccatatgacccacattgaccattatagttatagaatgatacacaaagacagccacacacgtatgcacgcagcacagctacacccagacatgcaatgctacagacttagcaaacagccacatttatacattcagatcttataacacaggcgtcatcccacaaagccaaatagacacagctgtgcccggagctgcatattcacagctgcacacttagaccagagatactactggctacagaacccatttgtatgttcagagagatacacccagcaacatttgcacaaggctttgtttatccagctacaatccaggctcatggctattctcctccaatatgacccagttatacagctgtgacacacgaggcatacacccagtggagagctggaactggcttaacacagattgttgcgttttcaggaattttgcaacctggtggttaaacacagcaattgtttcaaaaaactacattatctgcttacaataaataaattatattaaaaacaaaggtaaggaatcctccaaaataatcacttcctgattgttttactacattgtactgtcatgtatggtcagagataatttacttctattgttatctgtacagtggaaatattatataatggtatggtagtgtacgtctcctcccaaaacttccttcagttcagtgacagcatgttggtagcttgaaattggccatgggatgagtgtttacaccacagaaattggcaaacactacaggtcagttttttttttttccttgagaactggttgttaaacgttggccagcacaccactgcacttacccatgttgatattccatgattgtgtatgtctagacagatctgcgcccatgctaacacaatttgtatagtggttagagcccaaaaggactgagtttgaatcccaacttggctccttataaagcatgtgaccttgagaaaattatttaacctctctctttcttggattgctctttggtgaacacaggataataattctgtaagaatgggaataatacacaggacctacccgatagggccattgtgaatgttaaatgagataatacaggtaaaaaacttagaagagtgcctagtacatagcaagcctttaattaatgttacacttggagttgtgtacccccaagttcacatacacacacatctgcaggtcacgcttctgaaaacctactgtgaacccaagttctcagggaggctaaggactgacagagggcagctcttaggacatggtccaggtcctgccagggtggggattggcagctggaaccatgaactgtgggccaaggataggaacatacaggacaccgtcccctggtgctccccagggaactgatctcaggacagcaggcaggtatggcttctaggaaggggctgggggaaaggagaaggctgaaatgggtcggagggtgtccagggcctggcagctcacagattttcaaacctaagcctttttctgcctcctgccttctttctgctttagttctgcacaagttcatccactcagggagcactggactctctgctgagccctaagttctcagagattagaacggttctctttacccgagagaagttaaagtacctgttcacacaaagacttgaaatgaatgtacctagaagctttatttctagcagccccaaactggaacctatccataagtcccatcaaccggtgaatgaatttaaaacattgtggtagactgggtgtggtggctcacgcctgtaatcccagcactttgggaggccgaggcaggaggatcacttgaggccagaagtttgagaccagcttgggcaacatggcaaaaccctatctctacgaaacaatgcaaaaaattagccagatgtggtggtgcatacctgtggtcccagctattcgggaggctgaggtgggaggatcacctgagcctggaaagtcgaagctgcagtgaactgtgattgtgccactgcgctccagcctgggcaacagagtgagatcttgtctcaaaaaatgccaggcaaactgtggtacatacatacagtggaaaccactcagtaataaaaaggaactactgatccacgagacaacatggatgagtctccaaaatcattatgccgaaataagccagataaaaaagggtttttgccctacatactctttacataaaatccttaaagatacaaggtcaactatagtaacagaaggcagaattgtggttgtttaggattggggatggggagggatggattagaaaggggacaggaagaagcttttggggctggtggctgtgcttttatcttgattgtggtgagggttccatgggtgtacacgtatgttgaaacttatcaaattttacactgcaaagtgtgcagttattgtatgtgaattatacctcaaaaaagctgttttttgtttgttttgttttgttcgagttggagtctcgctctgtcacccaggctggagtgcagtggtgtgatcttggctcactgtaacctccatctcctgggctcaagcgattttcctgcctcagcctcctgagtaactgggattacaggcatgcgccaccacgcctggctaatttttgtattttaatagagatggggcttcaccatgttggccaggctggtcttgaactcctggcctcaagtgacccgcccacctcagcctcccaaagtgccggaattataggtgtgagccaccatgctggccaaactgttctgttttgttttttaaaaggctcccagtcctcaccctgcgaagttcacagtggggaggtaagggaaggacgctacaggcacacgagcaacaataagccaggaaggaattcatttgggaggaaagatggggaagggggagggcattcctggggagaggcacagcagaaccaaaggctggaggtcaggagcctggctcagagggtttgaacccagcaggtggcgggggatgaagttagagcaccacctaggacagattgtttctcgtctctctccttccttctgccccttgcctgtccttcggccacatgtctgtctgtatcctcctgctctctgtaccaagaccacacaatagtcagagaagcctggtcaggacccaggccccagtcctcaccttgtggcctcccacaggaaggggccctggaccttctgaagaagctgcacagctgccagatgtccatccagctactacaggtggggcgggggtgggaagccttgggacagtgcctggggggagagctggtgggggagggaaagacccctggtgggggaaggtggagtctgggaggaatttctgaggggggcctgtggggaggggatcttgaggtggagacctcccagggagggactgagggggacacaggggcatctcgggggcggagagggtatcttctaggtgtaggggacctctgggccttggagcaagactggttcgcttttcttgaataccccaattcccaaggccctgggcctgtgggatccaagaggccaatgatccagggagagggaaaagcccccatttaaaatccctgtgtagcccttaaagtccccagatttaccaaaagctcctggccctgaaaaatcagcacagacagatgcaaggtctcatagccggagctgctgtctcagttgaaactggagctcaaagacactagagtgagctggccacggtggctcatacctgtaatcccatcactttgggaggccgaggcaggcagatcacctgaggtcaggagttcgagaccagcctggccaacatggtgaaaccccgtttctactaaagatacaaaaattagctgggcacgatgatgcacacctataatcccagctactcaggaggctgaggcacgagaatcgcttgaacctgggaggtggaggttgcagtgagctgagattgcaccactgcactccagcctgggcaacatagcgagactccatctcaaaaaaatagacactagagggttgggaatgggaggggtcctgacagtcagccaagtgccacccccaaccctaggttcaggtttcaccaaagctacagatatcctccatgtcaggcttagccctgggccctcggcctcgtgcagagcagggccttagttacagtagtggggttctgacctcagccaggagtcagggctaggactctgggggtccaggttggaaggggaggtggtggtagagctggggcaggatctgccaatgatggcagccattcctgtgtatccattcccagattatgccttaaccctctcactttgcagacaaccaggattggagttgctgttaatggggtccgcaagcactgctcagacaaggaggtggtgtccttggccaaagtccttatcaaaaactggaagcggctgctaggtgagagaggacaaggttgtcttgagccctgtttttctcctagcacttgggacaggactgggcctggctcatagccagcactcagtgtatgtctgttgagtgacttaatcagtgacagatggcctctggatccgggaggtagctagtgggggactgccaatgtttgtgtacacaagtgcaagatttgtagacttgtgagttttgtgtacatgtgccacttacgtgtttgtgctctcatgcatttgtctatatagtacatgtctacatgcacacatttgtcttaatatgtgcagagatgtgtttgccaatgtattaatgtccccatgtgagactgtgtatttgtacacacgttcctgttgtttgtgcatttgtgtgtaaatgtgtttgtgtgtgtgttgggagtgtgtgtgcagctgtcctcgtccctgccctttgctctctccccactaagtcatgctgggttctgctgagacagagcttagctgagggacaatgccacccttttgttttcagactcccctggacccccaaaaggagaaaaaggagaggaaagagaaaaggcaaagaagaaggaaaaagggcttgagtgttcagactggaagccagaagcaggcctttctccaccaaggaaaaaacgagaagaccccaaaaccaggtattcttttttgggatggagagaagggagctgacacttgtcacgtcctctgacagcaactcagtgtatattatctcatttaaacctttcatcctggggaggaagatattggtattatctcctgcagtgccccctctgggggtcttctttggctcaaccagatgttagactcacaagacccaaataggacataaatggcactggctttgcctagaaggatgcagggacaggaaagagtgcgtctgcgggagggcctccagcatttctctacagagagttcccataggagaccgcacggcagtctagagctcttctctggcccacccaggcaacagcctaggtgcggggaaacaagaccacagcgggtataagcctcacatcccgaatcttgtaacagtcccaaagacaaagattccaagatgctagcaaaggcaatagccacttataagattcattgcacctggcgcagtggctcacacatgtaatcccagcactttgggaggctgaggcgggaggatcacttgagcccacgagtttgagacaagcctgggcaacatggcaaaactccgcctctacaaaaaatacaaaaattagccaggcatggtagcgcacacctgtaatcctaactactctggaggctgaggtgggagaatcgcttgtgcccgggagatggaggttgcagtgagctgagattgcgccactgcactccagcctgagcaacagagcaagaacctgtctcaaaaacaaacaaacaaaaaccaagacatatattataaattaaaaggatctctactttctgtattatacaataaaaattttaaatctgaattgttgggttttttcacaatgatcctgtactgcttttgaaacaaaaaataataatagtgcttttaaaaactaaacaaataagagtgataaaaatctgttgtagaaaataatggaaggccgggtacggtatctcacccctgtaatcccagcactttgggaggccgaggtgggcggatcacttgaggttgggagttcgagaccagcctgaccaacatggagaaatcccatctctactaaaaatacaaaattagctgggtgtggtggcacatgcctgtaatcccagctactcgggaggctgaggcaggagaatcacttgaacctggaagtcggaggttgcagtgagccaagattgcaccattgcactccagcctgggcaataagagcgaaactccgtctcacaaaaaaaaaaaaaaaaaaaaaggaaaatgtagaaaagtagaaaaaaaaatcacccacattcccaccacccaaagacaatcactcttgatgagttagtgtatggcttttctttctgttctctgacttgttttctatagtcatccccaattttaatagcctgctttttaaaaggtaatgcctgtgaaatggttttgtcacattttctatgttctgttcctttccattgctcattttgcaagtgtatcctacttggaaaaaccctaattggcatctaacttttcacacgagtgtgttttcttttcccaaaggggttagaagtttggctcggggaatccctgaccatctccacagtgcctagcacggagtgaacatttactgaatactgctagcccatttgtagcagcatggtcccctgccctgtggattacctcctgttcatgccctggctggtctggccatgtctggagcacctgtgtggttatgagaaccttggcaaatgaaggaccaggagcaggagagctcttatgagatgaagttgaaggactagaggctgaactactggggagggaccaaatgggatttgggactaatctgtcacatggggagtgtaggcatccaggtaaaagtggcagcctgaacacatgcagtttttgtttttgtttgctccatccccaagccccactgaatgaacagtaaagaggctgggcgcagtggcccatgcctgtaatcccagcgctttgggaggccgaggtgggtggatcacctgaggtcaggagttcgagaccagcctggccaagatggtgaaaccccgtctctactaaaaatacaaaaattaaccaggggtagtggtgcacgcctgtagtcccagccactcaggaggctgaggcgggagaatcacttgaacccgggagcagaggttgcagtgagctgagatcccgccactgcactcaagcgtggacaacagagtgagactctgtttaaaaaaaaaaaaaaaaaaaaaaaaaaaagaacagtaaagggatttcttttaaaggcctgtatgagaacaacaggtgtaggagaggtaacaatgaaaaagcagaaagccaggttctgggctgaacttgtcacttatggccttcttctctgagactcagtattatggcctgaaacacagacatcattttctccgttctttcttcttaaaaataaaatgttttatttgtaatagtctttaattatattttagttgtcttagtttagcgattttgtattttttataatacagataattacttgctcattgtagaaagttttaaaaatacaaataaataagaaaataggccgggtgcagtgtctcatgcttgtaatttcagcactttgggaggctgaggcaggtggatcacaaggtcaggagttcaagacaagcctggccaacccagtgaaaccctgtctctactaaaaatacaaaaattagctgggcctgttggcgggtgccccgtaatcccagctactcaggagactgaggcaggaaatcacttgaacccaggaggcagaagtgtcagtgagccaagatcgtgccactgcactccagcctgggcgacagaactagactccgtcttaaaaacaaaacaaaacaaaacaaaagataagggccaggcacggtggctcatgcctataatcctagcactttgggaggctgaggcgggcagatcatgaggtcaggagttcgagaccagcctggccaacatggtgaaaccccatctctaccaaatatacaaaaattagctgggcatggtggtacatgcctgtaattccagctacttgggaggctgaggaggagaattgtttgaaccgggacccaggaggcggaggtttcagtgagctgagagcgtgccactgcacgccagcctgtgctacagaatgagactctgtctcaaaaaataaaataaaataaagtaaaataaaatatcatttattatctagaaacaagcactcacatataattgtgtgtatatatacatataaaatttatatatatatatatatatatatacatcctgctagactattcctatgcattactacctataaataggtataaaatacctatttgttttaataaaattgaattacactctgtatactattttgtaaccttttcatgtacataaatgtattcatttcagtagcaaggtgtgtttagtgtaaaaagtttagaaaatcaagcacaagaagaaaataacagaaataaccattgttaacattttaatgtatatctttgtagttttttaagaacatacaggccaggccaggctcagtggctcacgcccttaatcccagcactttgggaggccaaggcgggcagatcacttgaggtcaggagttcaagaccagcctggcctacatggtgaaaccctgtctctactaaaaatacaaatattagctgggcatggtagtgggtacctgtaatcccagctacttgggaggctgaggcaggaggatcgcttgaatttgggaggctgaggttgcagtgagccaagatcaccccactgcactccagcctggatgacagagcgagattctgtctttaaaacaaaaagaacatacatatgggctgggcaaagtggctcatgcttgtaatcccagcactttgggaggtggaggcaggtggattacttgagctcaggagttagagaccaatggcgaaaccctatctctattaaaagtaaaaaaaaattagccgggcgtggtggcgtgcacctgtgttctcagccacttgggaggctgaggtgggaggatcacttgagcctgggaggaggaggttgcagtgagccgagatcgcactactgcactccagcctgggtgaggagtgagactcagtctaaaaaaaaagaaaaaaagaacattcatatgtacatttatatttatattttgttaataaaatttgaaatgcactatacattttcctgggacactaaattgttatgcccactcacttttcacagccatggggctcagaaatgaagctgtcgctggtgctgagcagaaaatggagaggtatctcctcattctgctgggagaagccagttgtcgggggtcctatttcagctcagttaattaatttccttcctttttagttttcttaatgataattcattatacaaacactgtaaccacattagtgaaacttagaataagcatgggaaatatttgtgcacatcagacaaattaagcagcttttatttttcttcctctcctctcccaggcctggtttaactacatacataatttttccattcctttaggcagactgtacaatttttttttttttgagatggagtttcactcttgttgcccaggctggagtgcaatggcacgatctcagctcacagcaacctccgcctcccaggttcaagtgattcttctgcctcagcctcccgagtagctgggattacaggcatgtgcctccatgcccagctaatttttgtattttttttttagtagagaaggggtttctccatgttgctcaggctggtctcgaactcctgacctcaagtgatccgcccacctcagcctcccaaagtgctgggattacaggtgtgagccaccatgcccggccattttttttttttttttttttgagacagagtctcaccatgttgcccaggctggagtgcagtggcgcaatcacagctcactgcagcctgcaactcctaggctcaagtgatcctctcacctcagcctcctgagtagctgggactatgggtgcaaattatttttttaaatataaaacagtatttgaatttttgtccttaggaactataaagattatacgtgatttggaaatgagactgtagcaaacaatggccgaagaagaatcacccattctatgccttctcctttgtctggtcactcagaaatatcctactatcagctatcattgcaggaaactgaggaccagagagaccaataggagagcaggagggttgtttatttaaggtatgcaccggctcagtggattcgtatctaaacagctgagcattttagcaaagacagagcggggtttttacaagcaggcttacagaagcaaaacaaaagcagttaatcatatgataggtcacataatctatagcatagcataacttgtggccttgcatagctggcagccttgtagctgcattgaaagaaaaacaagaactggctaaatacagacatttgtaaaacatagtcatgcttaagaagtcagggaaaggagtaatagtaaaggaatttgtctttctctctttttttccttcaaccttgctctggaggggaggggtgtctggagcccattcctttggccttggtttcccaaacagcattatcttataactgtccttgaagtgagcttgctaggcagaggaaaacctgttcttttctttttaacccttgccttgcctgttacttttcttggggtgaatgaatgcatatttatttttaaatttctgcctcactatgattgttgttgcttgtcgcctcccattatttttatccgtgtattcaccatagtctactttttcttctgcataaattcgagacctctggctgggtgcagtgactcatgcttgtaatcccagcactttgggaggccaaggcaggcagatcacttgaggtcagaagttcgagaccagcctggccaacatggcaaaaccccatctctactaaaaatacaaaaaattagccgggaatggtggcgcgtgcctgtaatcccagctactcgggaggctgaggcatgggaatctcttgaacccaggggatggaggttgcagtgagccaagatggtgcccctgcactccagcctgggtgacagattgagactccatctcaaaataaataaataaaaataaacataaattccagacccctttttcactgatgtgccacatctccagggcctggctagaatgctgatattctgtgccatgtcatcttgacagacatcacccatttggtacactttcctgtcccctgatcaccacatctcatttgttgctagagaaaatattgtgctggagtatttccttccatctgtctcatgataaggtcctaacccacttgtccaagtaactgcatacaattcagggatctttcaagaaccaaactgctagctgttttggactcatgccttacaaactgatgaagtacctgtaatacaggtctttgaaacatggtttctattttctttcttttcttttcttttgagatggagtctccctctgttgcctaggctggagtgcagtggcacaatctcagctcactggaaccaccatctcccaggttcaagtgattcctctgcctcagcctccgagtagctgggattacacgtgcacaccaccatgcccggctaatttttgtatttttagtagagatggggtttcaccatgttggccaggctggttttgaactcctgactcaagtgatctgcccactttggcctcccaaagtgctgggattacaggtgtgagccactgcgcccagctggtttctattttcttacggtctaatctttagacttttcctgatgctctagctctagtatcgactaatatgtcacctttttatttatcttgctattgtattctaagcatttttttatgttcctgaacagttttcataacagtcatttgcaataactgcggagtatttctgatttattctaaaaagaaaagcaatgaggaagagtcagaaagtggttctccagggtggagtctcgtgtcttctctcccctctcccactgtaggaattccagcttatggttcctgcttgcattgtctatccccaaggtgcactagggagaagccccacagaagaactcccagggcctgttgtgggagtgcaggggcatgtgaatgaggacctctcttcccctctcccatgtgtctggtggagggctgttcctggggtcattaattagtgaccagcacttccagccagcctagctgtggggaagaactccctcagacagaggccctggggagcttgcaggaggcagctcttgggtccagaggcactgagagagtgagcacccaagggaaactgggctgagcacagacaatgttcaccacagtgaccaaaacccaccaaatgctgctcttgtggaatttacatggggtgtcggacaataaatataattaaatataaataagtaaattggccagacacagtggctcacacctgtaatcccaacactttgggaggccgaggtgggcagatcacctgatgtcaggagtttgagaccagcctggccaacatggtgaaaccccctctctactaagaatataaaaattagctaggcatggtggcacacgcctgtaagtcccagctacccaggaggctgaggcaggagagtcacttgaacccaggaggtggaggtcgcagtgagccgccgagatagcaccactgcactccagcctgggtgacagagtgagactctgtctcaaagaaaaaaagtcaattatgtagtatgctagaaggtgacacgtgctatggaattaaaaggaaggcagggtaagtgagatggggagtggggtttgcaattaacaaacagattgattttttaaaaccagtaaaaggaataactatattatatatcataaaaataatgtagctgaatgcattttggaaaaattgggaaaaaatcacctttaatcccatcaccctagctgtaacagtggttagcatttgagtatattttctttagatctgcttttcctcctatgcattggttttcttgcgtgactttaggcacagtccgcatctaattttgtctcctgcttttttgattgctattttaactcagctcttctatccccaaggcccatgtgtttctcctctcctcctcctaaagtgcctgccggggaggctgaagctgatttctctgtttctctggttccagatgagtacagacaactccaggaatccagtctctgtggactccagttagctaaggcctgcctgacagccaggaggacagggacctgctgagaatagttgtaaataatgagcaacacaacccatgtcacatacatggcatgtgttaggcccttggcagatatcgacttccttcccttgtattggttcacttgatggagggtaggtgaaggtcatgaccagccggcaccgcctggagctccctctcccaagtagctgtggcccgggtgggcttccttagcctcaagccagctggccttttcccaggatgctttctccccaccttcctgtcagtactgatgctagtctacaaagcagtctccttgccaattttcttctttcaggagagactctgtggactccaagtcttctgcctcctcctctccaaaaagaccatcggtggaaaggtaaaggaaaccacagctttctccatcccagtgtcctattcagcctgtgtccccttctctgtttttatggaggaagcccaaggcagaggaaaggagggaaggaagaaacctcctacattatgttgcccccgtattctaagacccacacagtctttccacatttcagccctgggggaccctctggatgtgcctttgatctctctgtggtcaattcttcaattcatcatgtattcattcatttattcattcatccatccatttagcaagtgtgcccccgaatcaggggtgtggctccttccctggggtggctgactggttgctgttgccccatcactgtcaggggaccagtctcaaggtccgattgaacccagtggggacagaggtcttgaaagccgatacctaggctgggcacagtggctcatgcctgtaatcccagcactttggaaggccgaggcaggcggatcacttgaggtcaggagtttgagaccagcctggccaacatggcaaaaccccgcctctactaaaaatacaaaaattagccaggcatggtggtgggcacctgtaatcccagctactcgggaggctgaggcaggagaatcgcttgaacccaggaggcagaggttgcagtgagccgagatcgcgccactgcaatccaacctgggcaacagagtgagaccccatctcaaaaacaaaacaaacaaaacaaaacaaaaaagaaaagaaaagaaagaaaaagaaagaaagcctatacctggaatgggctctctctggatttgggctgaactggctaggatgtctacccaaaattagcataaatcatcaagtcatttagtcatcaaatatttattgagggcctattatgtgtcaagaactatcctaggtgccagggatacagacatgcacaaaagagacaaaaatccctgcagtgatgggggcctttattctaagtagggggagacaggtaaagttcagaaggtgacaagtcctgtggaaatcaaaagaggagagggaagaggatcggggaaggatattcatggagttgtcagaaaagtcctcatcgaggaagtgatcgttaggcaaaagcttgaaagagggatttagccaagcagatactggggtcattccaagccaagtgccctgaggtgggggtgtgcctggcagagtcaaggaacagtgaagtggctgagggctggagcagtttaagcgaaggggagggttgggggaatgagtaaagctggagctattggagggtactgagggcgggaatgatgtcaccaaatttatcaggatggctctggctgctgtgccaggaatgaaggaacagcaacaccagccaggaggctgttgcggtaattcaggcaagatatcatggtggcttggatcagggaggtaatggtggaagtggggtgaaggggtggtttccggatatatcttgacaggaaagctgacagaacttcctgacagattggatgtgaggaatgagagaaacagaggagtcagggatgagtccaagatttttcacttgagcatctgcaaggatggagttgccatgaattggcatggggaagactgtgcttatgcaaatcaggcttggggtggaaaatccagagttcaggtctcgatgtgttggatttgaggcgtgtgttagtcattcagttggagaagtcaaatatgcagttggattatatgaggctacaactcaggaagaaagtctcagctggaaatataaattgcagagtcaaggccaggtgcggtggctcatgccggtaatcccagcactttaggaggccgaggcgggcagatcacttgaagccaggagttcgagaccagcctggccaacatggcaaaaccccgtctgcactaaaaatacaacagttagtgggcgtggtggcaggaggctgaggcaaaagaatcacttgaacccgggaggcggaggttgccatgagctgagattgcgccattgcactccagtctgggggatggaacgagactccatctcaaaacaaaacaaaacacaacacaacaaaacaaaacaaaacaaaaattgtagagtcattagtgtgtaactgacatctgaagaacctggatgagggcaccaaggaaagattgtggataaaggagtgggtgtgaagtgtggtccaagagagtggtcagaggtcagagcaggagaaacagggccaaggagagcaggccaggccaggaagtggccaagcagcagatcaaggagaacgattagggtccatgggccacattgggttttggggcaccttggtgggatgataagggtgttggcctctgggagagtaggtgtgagagctgcagaattattttaagcctaatgtatcagtaagattgccattggaaagaaaattagagacacaaaaattaggttgtttaaggttttatgaagattcaacgggcctaggctgtattgcacacctccaacatggcagccagctccagctgatgcatggaagctatctggagtgctgattggagagggagtctgaggctgtagaaaaagttctgtagtcaattagcaatgtctgatgtgggtcaggcctagaaatggtggttccagtgtcatcctggttctagaccagtggatctcagcaggggtcatttagaaatgtgtggaggcgtttatggttgtcactatgacttgggccaaagtaggggtaaggtgagaaggagggggatactcctgacatttcgtggcaggaaccagagatgccaagtgccccggagagtgaaggactttcctggataatgaagcgtcatcctatccccagatgaaacactggtcactaatgacattctaggtttgatgctgtaatcaaaacactcgacattcatgtaaggatttgagcctccagactcctctcctgactttgtcttcatggtcttgaaatctcctggctccctcccctaatgcattctttctctgaaggtcagtcaaacagaatctgtttgtccttccagaagctgtgccatttcctgctggttcagtactgagggtaggaaaccaaaagggacacaaggaagtctcattaatttttttttttttttgagatgaagtctcgctctgttgccaggctggagtgcagtggcacgatctcggctcagtgcaacttccatctcccggattcaagtgattctcctgcctcagcctccaaagtagctgggactacaggcatgtgccaccatgcccacctaattttttgtatttttagtagagacggggttttaccatgttggccaggatggtctcgatctcttgaccttgtgatccaccctcttcggccccccaaagtgctggtattacaggtgtgagccaccgtgccaggcagcaaatctcattaatttgtctcctacccagactgtttcctgcatgatttacttctctatttcatttttctcttccgttctttcatccattcattgatttggcaagcacatctattgagcacttccttgcaaattcaacattctctggggatcaagagcacatgcatacacggggtgactagtggagatcatggcaaactagaaagtatgtgcctgtctgaagggggcagccactaccccactgcagctgattgttgctttggggaaatgcaggtccagggtgccatgtcttccaattttttaaagaaaagccagacacctagattttcatatggaactccccgacaccaccttttctgagacaggatctcacccaggctggagtgcagtggtataaacagggctcactgcagcctcaacctcctgggctcaagcaatcctcctgctccagcctcccgtgtagctaggaccacaggtgcacaccaccacacccagctaacttaaaaaaaattttttttttgtagagacagagtctcactttgttgcccaggctggtctcgaactcctgggctcaagaaatcctcctgcctcaaccacccaaagtgctgggattacaggtgtgagccaccgcgcctggccaaaactcccagttttcagtatcagcaacatattcacatttttctaagacacaatagggagacaaaacatatttgtagctcacccatttttgacctgtaaggccaggcaaaggttgaaactcatcacctctcccttcttagggctaaccatgagtgcagaggcagacaccaaaatgcatgtttttagaaaggggtaggtataaaacaccgtgggaacataggaagcatgtctcaatatgactataaaagtcaaaggaggcttcgtggaagagaaagtatttgagctgagaatggaaagtcaataggaggagtttgggaggcgagtcaggagagtcatttcaagcagaaagaaatggcacacccaaaggtgtggaagtgggagtgagcacgatgctctgggaactgtagctggagtaccaggaagcagaccacggaggataccatgttgacaggggagaaagttgactgttctcagttgtccttttacctggctatcagaatgatttgccatttgcagagcatgctcgctgatgcagtaactgaaatgccctcgaggtggcgcacagaagcagcgggcccggcctccagatgcctctactcagacctggggcaggaggattttctaaggactggtgcggtgcgggcacatccggggagcagaaggaagctgttgataaatccaacctcccaccccggccgatgatgccctctctgcagtttggctcagttcccaggcgtgtgcattgaaagcaaaatgagtgtggctgcctgaaatgctgcccagacacgaattccagccagccagccagctcctaaccggggaggcgggaccagggctgggtgtgccctgccaggaaggtgggaagaaatgctccaaacagcctagtcttgctcaggtaggaggactctggaaacctctcttttaaagacacagttgatgtgttgaaaagaatttggaagggcgacaggcaggttcgtggtctgactataccctttgctagttggatggataacttggggcagtaacttggatggataattcagttcagctctctgagcttcagtctactgatctgtaaaatggagacaattatgaacccctttcaaggtcattgtgaggattaaatgaggtaatgaaatacccagcactgttcccaaaccatgtaaatgctcaataaatacataatactttgtaataatactcatatgaaacctggttatctatgtaaactgcctaatactttgtcacttagttgctttcatctgccccataagatgggtactattattattccgattttacgtgtgaaaaaaactgaggcacctaggggttaaggaactcacccaaggtcacatagctacaaagtgttggtctcaggctgtgaacctgggagtttggctccagagactaggttcttaataagtaaaccaactcagtgcagtcgtttcaaaaacgaccaccattattactgtcattcgttggggctccttcaaagcagcatgctgcaggctcccctgacagttttcctgtggtgagtcatagctgttgagaatgtgcaatggcacgcacaggtcagcgagacaccatcccagctgcaggagatggcgttgcctgggtcctgggagttgacagaggctggctttgagagagatccctctcgtactcccagagagagagatccctctcttaggcccagagagtggggccactgtccttccaaagaggaccttcctctttccacatttcagccctgggggaccctctgggtgtgcctttcatctctctgtggtcagttcctcaattcatcatgtattcattcatttattcatttatccatccatttagcaatgatgtatcaagtgtccacctagagcactgttacaggagctggaatgcagtggtgaacccgtgacagggtcccaatactctggagcctgtaatctggagatggaggcagacgatgtttataaacacataaacaagctaatcatacacttggataagtgctgtaaaagcgagaaatcaggtgatgtgctagagaattacagggcggggaccatcagcctcagctgaggtggtgagggaaggcctccctcatgcgagctgagacctggaggaggaagagcattccaggaaggaagaccagcctgtgcaaaggcccggcagtgggagggatgggtatgtttaaggaacagaaagaagcagtgctgtggaggccttccgtaaaccatgcggagagcatggcatgagattacatcagaaagtgggtaggggcaggacgtgcaggggctgggaggctgtggtgagcttttggttttgtttttgtttgtttttttggaaacacagtctcactcggtcactcaggctgatgtgcaatggcatgatctcagctcactacagcctccacctcccgggttcaagcgattcttgtgcctcagccttttgagtagctgggattacaggcatgcgccaccatacccagctaatttttatatgtttagtacagacagtgtttcgccatgttggccaggctggtctcaaactcctgaccaaagtgatcctcccacctcgatctgccaaagtgctgggactttaggcatgagccactgcacccggccaggagttttactttatgctaaaaataattggaagctgttacaccaccagtccccaacctttttggcaccagggactggtttcatagaagacggtttttccatggaccagggtttgtaggggatggtttcaagacgaaactgttccacctctgatcatcaggcattagattctcgtaaggagcgtgcaacctagatccctcacatgcgcagttcacaacagggcccacctcctgatgtgtggcccggttcctaacaggccacagactggtaccagtccgtggccccagggggtgggaacccctgtgttggagggttagaggcaggggagtgacttgatccgctgtgaatttttgaaaagtccctctggcggctctttggcaaatggattatagtgggggaagaggacacagggaaaccagttttggggctattgtgactgttcaggtgggaaccctgtgaccaggatcaggcttgggggcaggaacatccgttttggatgccaacagccccgcgagttcacgccctgtccagcctttcctcacccaaacctcctgctgcaatctgactccaggagaaatctgcttggatctcagcttccctgtccctccaccatgctgccaggcaacccagttgtcaggcagggtcgggtagaattaaggctagattaatctaggacagtaagtttcaaactgcattaaaaataaataaaagctaggaaatgaatccctttggacaaaatttttagaaattcaaaatgtaaaccttacaagaacagagtttaccatccccagcccacctcaccggtatgcatggaggcacttttgaggaacctcaagtctctagagaatgcaaaaatcccaaaggtccaggggtctggggtgaaagaggagatccaaggtcaggccaaacagcaagaggtgggggacagggaggtcaccagcagagtccacactgagctgtgcccagcaggatgttggatgggattctctggtaactccaggttgttgatcctgagaagcctgggctactcagttagcctcactctcagacacaactccctgggcctgagagactttgtcagaagtccagaatcctcttcttcctgaaaggaagtagcatgtccacagcctgaaagtgaacatgagaagcagctgtggatccaggccccaaggctgcctggcgcagctgcccaggctgtgcactgtataattacaggaggtaccaagctactaatgtaaatggtgcctcctggagtgaggaaatgcagcagctctctgggcgcttccacaagggctcagtttggtaagaccctcgagtgggtcttaatttcactccaggaggggaccttaattttttcaactctgatgagtccacttttttctcaacagagatataggggctggctggcagattctgatgggttattgaaaaaggaggtgagaagagcagaggaatgaagacagagacttcctgacttcctggctcctaccctaaagaatagtgcaaaaacatcttgggagggagggagttgtgcaactatcacaaagtcttgccaggcacagtggctcatgcctgtaatctcagcacattgggaggccaaggcgaatggatcacttgaggccaggagtttgagtccagcctgagcaacatattgagacccccatttctacaaaaaaaaaaaaaaagcctggtgtggcggcatctgcctgtagtcagtcctagctacttgggaggctgaggcaggaggattgtttgagcccaggagttcgagattgcagtgagctatgattgacacacttcacttcttcaaggctccattccatcatctgtaaaatgggcccagtaatttgtgacttttagggttaccaaaaagaataaacagcagagcagtggtaaatggtggcttttgttttaccatccttaacaaaccccagagtctggttagatcctttctctccaactccctctccttcttacaagctccctcaccctcacgctccagctgcattgagccctttgacattgcccatgcaaaccttggccttctacacttccatcatttctgccaagaatgcatttttttggccgggcacagtagctcatgcctgtaatcccaacactttgggaggccaaggcaggtggatcacctgaagtcaggggttcaagaccagcctggccaacatggcaaaaccccatctctactaaaaatacaaaaattagctgggcgtggtggtgcatgcctgtaatcccagcttctaggtaggctgaggcaggagaatcacttgaatccgggaggtggaggttacagtgagccaagattgtgccactgcactccagcctggcagcctggatgacagagtgagacaccctctcaaaaaaaaaaaaaaaaggtttctcacatcgcaaaagtagataaattctgtatagaagatttagcaaataggcataagcaaacgaagaaaatgaaaatctcctatcattccacctcagagagataattgctattaacatggtattatgggctgaatgtttgtgaccccctaaaattcatatgttgaaatcccaaaccccattgtgactgtatttggggatagggccttcattaaggttaaatgaggtcataagggtggagccctgatccaataggattagtgtccctatgagaagagacaccatgtgaatacaatgagaagactgccattcacaagcaaagagagagccctcatgagaaagcaaattggccagcaacttgatcttgggcttcccagcctccagaaccatgagaaataaatttctgctagtgaagcctcccagtctgatattttgttatgacagattgagccacatagttagccttctaaatgtctgtgcacatatggatatatatatatatatatatatatatatatatatacatatatacatatatataaacaaaacctgaatgagataattcttagatagtacatcatagattatagcataggtgttggctgggtgtggtggctcacacctgtaatcccagcactttgggaggccaaggcagatggattgcttgagtccaggagttttagatcagcctgggaaacatggtgagatcccatctctgcaaaaaaaggtaaaaattagccaggcatgatggcgtgctcctgtggtcccagctccttggaggctaaggtgggaggattgcctgagcccaggaggtcaaggctgtagtgagccatgactgcaccactgcactccagcctgggtgacagagagagagagagagaccctgtctcaaaaaataaaataaattaataaaaagagcatagatgttggaattagacagatgtggattcaaatcctggtggtgtatagccttaggcaaatctcagtggtgtacctctctgggtttatttcctcgtcttaaaatagagatgatgagagtatacctcctgggactgctatgaagattaaattggaaaattcttttaaagtgcctggcacagttctggcatctagcaaagccagcccttttaaatggtggtagatagtcactattcactagactgtaagccccttaagggaaggagctttgctgacttatctgcattatcctttgttcttgacaagcgcctggagaataggtttgtaataaatatttagtgaatgagtgaataaacagttcatacatttaggagagcatagatagagagcagctagcacagtgcctaatcaattgcatataattattggtggtgttacactgttctataatgagtaacgcacagtggctggttaagagccgactgcctgggtttgaattctgtttctactggttcgtcgatgtgttatctgagccaagtgcacctttagatacatctttctctaccatgcactttaaaatgcatctctcgaatggggatgagaatagtatcaacctcatggggttgtcacgaggattaaatgagatgatccatgtcaagtgcctaaaatagtacctacctcatgaggttgttatgaggattataggagatcatccatcaagacatctagaatgctgctcaataaatgctttactctcttaatgtcaaatgtctgttacttattgtcatcctcagatcaaacagcagcaaatcaaaagcggagagccccaaaacacctagcagccccttgacccccacgtttgcctcttccatgtgtctcctggccccctgctatctcacaggggactctgtccgggacaagtgtgtggagatgctgtcagcagccctgaaggcggacggtgagagagcctgggctagggatgagggagggaaggagtcccttttcccaatctcactgagggcagatgaaattcagtctttctcagcaccccaagggatggtacaggaacactctagtcccaggtacaagcaggcttcactgcctacgttgtgtctggctgatacctgtatttctcgaatctcttttagatgattacaaggactatggagtcaactgtgacaagatggcatcagaaatcgaagatcatatccttgaactgtgccggggctgtgggtgtctgcaccgtctagcagcacccatccaaggtgcaagcgagctgggagagtgaggaaggagaggaagggctccgggaacagcccctgctctgcccctgaaccagagttcttaattctatctaacattcattattattttacacctgccagcaaaacttgaaaatgagcagtacctcattcagtgttgataacaaccccacagtaggttccctgatttatccagtttcatgggtgaagtcactaagactcagagaggtcaaatcatttcccaaagcccatacagctaacagtagtagcagagatgggatctgaatccagaaattgtgaccctggaacctggaggctcagcggctgtgccagctaggctgtgtaatagcgtgcctcagttggccaagtcgttacttccaggaacagactagattgagaggtcagcatttcccatgctcagccttttcccttctcccatcctctgatgttaacagcgcccttttttttttttttttttttttgagacggagtttcactcctgttgcccaggctggagtgcgatggcgcaatctcgcctcactgcaacctacaacttctgggttcaagcgattctcctgcctcagcctctcaagtagctggaattacaggcatgcaccatcacacctggttaattttgtacttttagtagggatggggtttcacgatgttggtcaggctggtcttgaactcctgacctcaggtgatgcaccacccacctttgcatcccaaagtgctgggattacaggtgtgagccatcacacccagcgccctgccctctgtttttttactcccaaatatatatcaagcactgcaatggccaattgacacttcctacctctgttagctctcacagcattctctgtgaggcagggactgttcccattttacagatgaggagtctgaggctcagaactgtcaaagcgggactggagactttgtctttggattccatgtattgaatcctttccatgtgccccctgctccccaacttctcacctgaaaggggccttgtgtagacaggagaggtggccaccactgggatgtattcatagatctgttgcaccaaaaggtgtttggcttgggagaaaaaaaatcccaccccacttggcccccactgaatgaaaacatggagcttcttttactagagacaaaggtttgcatggtattggagcggggagacagtcaggggacaggaagtctaagtgtcacaccgaggtgtgagcgacccttttgagggctcctgggttctacctgcggagttcagcagggtctgttgaggagagccaggggccaatctgcagacgacaaatttgcgtttccatcttcttcctgtggcctaccctgattccctccaacttattttctggtggtttctctctactctcatttaatgattaatcagcaatacctcaacaagtctggagccattcagcacctcaaaaagtacattttcatcatttcctgttaattcaagaaggcagaacacaaggtatgagaactatcacgagtttcatcttcattttctcctgaacagtcatccctccaagcaggtcctttccacctttaagcccagtttgaaacaacagcagatggtccagtacaaagttccactcccagcctttcctccatccactgaaagttcctttttttttttttttttgagatggaatcttgctctgttgcccaggctggagtgcagtggcatgatctcagctcactgcaacctctgccttctgggttcaagtgattctgctgcctcagcctcccaagtagctgggattacaggtgcccgccaccacacctggctaattttgttgtattttttgtagacatggggtttcaccatgttggccaggctggtcttgaactcctgacctcaggtgatcctccctcctcagcctcgtaaaatgctgggattacaggcgtgagccaccacccccagcctgaatgtccctcttctaaaggagaggaaatcaaagctgcatcaaacactttagctctttgtttttagccagctggaggtcagggggagggtacatttgggggcttgactgctctatgtcctaaaatagatctgtcctctttggagtggccctgtgctaacaatgcagccaaaagttcctctgaggggccggtgcccccggtctgctctctgcctcgtcccctctgtggccttgggacatggagacagagtcagaaagaggctggtgaaagtatcgccagccctgctggctccgcatatcaatacaccccaggaatcccaagtggtacattttaaaacacattttttggctttcacatgcattgtggcatattctttgcttttcacacttttattgtacaaacaacattaaaacaataacagaaaaaagaaagaataccacctcccctcccaccacttctagcaagtcatctgttttcatttttccacattctccgcagtctctttattgtatatggctcttcccagcaacagctttgtcttcctgatcttctttggctcaggagaccaagaaaatgaggctgtgttccccgagctcctccagagggtggagggagtgggaggctcggaagcctgcctaggatgcagtgtttggacagaaactctgtggttggtggccagggatgacttcctgccgggtgagtggagagagttaccgtcaggaggggtctggcttccagccctgtctctgccgggaatttgcctggtggccttgagcaaggtcctacaccctttctaagccccagcttcctcatctgttaatgggagaagtaactctgaccagcaattcccagcgtgggttccatgggatggtaacaggtcttgtaggggaaaggacagaggggaaggggactctataatcaaatttattgggaacaccagattaaacaaagctcagtggtttcttttttgcaatacttcgtagagccttaaacatgtggctcttaatcttttcctctgacagctggactcacaacctccaggggcccttccaaactagaagttatccgcatccttgtcatcatcttagcagcccatacatgttgagcatttgatatatcccagacaccacactagtgcatcacgtggcttagctcacagaatccttgtattttataaataaggaaactcaggcgtgtagaggttgtgtgactcacctgaggtcacacaagaggctcagacaaacccagggtcctggtgtccctgacactatagtgcttgctatgatctgatcttaccccagaagctattttctttctctgctacttggctgaccacaaatgcccaagagacatcaccacttggagagtcagaggtcacaaaagaggggcccaactcctgtagaagtccgaggagaggaagaaagggttctggagctctcaggcgtcagggccaggcctgcacccttctgtgcccctccatgaatggctggccggcccttgactgtgtcacatatctaccaagagctcaagagcacggacatgaagtaccggaaccgcgtgcgcagccgcataagcaacctcaaggaccccaggaaccccggcctgcggcggaacgtgctcagtggggccatctccgcagggcttatagccaagatgacggcagaggtgagagcagggcatctgcatggtgaggcaggaagccaggtccccctagccctgcctagtgcagagggtcagtggctcgtgactcatcagcagtgagccagggagcttttcaaaccagcctcatctcagcctcccccctgggctctggactagcaggatactgaacacagctaataggttctaagtgctgtgctaagtgtgttcagcgaattggccaagtttatgttcacaccaactgagatagaaaggtgtattatccccattctacagatgaggatcctgaggctcagaggagtaaacgaatttgcccatgcacacagctagaaagagtcggagccaggaggcaagctgtctggccccagcgctaggttgtgtggcatgtgtgggggctgtacgtgtggagtgcgtgtctatgtggtacgtatgatgtgtgaggtgtgtagagggtatatgtggggtgtgtgtgtggtgtgtatatgtggagtgcatgtgtggtatgtatgtgtgtgtatgtatggagcatgtgcgtatggtatatattagggatccctaaccctcaggccaccagctggtacctgttgggaaccaggccacacaacaggaggtgagcagtgggcaagtgagcgaagcttcatctgtatttacagcctctccccatcactcgcattactgcctgagctccgcctcctgtcagatcagtgacggcattagattctcataggagcacgaaccctattgtgaactgtgcattcgaggaaaccaagttgcatgcttctcatgagaatctaatgcctgatgatctgtcactgtctcccagcaccccaagtgggaaccatctagttgcaggaaaacaagggatctcagggctcccactaattctacattatggtgagttggataattatttcattatatatatcacactgtaataataatagaaataaagtgcacaataaatgtaatgtacttgaatcatcctgaaaccatcccccaccctgtccatggaaaaactgtcttccaggaaaccagtccctggcgccaaaaatgttggggaccactggtatatatgatgtgtggagtgtgggggctgtgtatgtgtggagtgggtgtgtgtgtggtgtgtatgatgtgtgaggtgtgtttggtgtatagtatatgtgtgtggcatgtatgatatgtggagtgtgtgtgtgtgatgtgtggagtgtgtgtggtgtgtatgatgtgtggagtgtgtgtgtatgatgtgtggagtgtgtgtgtgtgtgtatgatgtgtggagtgtgtgtgtatgatgtgtggagtgtgtgtgtctgatgtgtggagtgtatgtggcgtgtatgatgtgtggaatatgtgtgtatgatgtatggagtgtgagtgtgtgatgtgtggagtgtgtggtgtgtatgatgtgtggagtgtgtgtgtattgtgcatgatgtgtggagtgtgtgtgtattgtgcatgatgatgtgtggagtgtgttttgtgtatgatgtgtggagtgtgtgtgtatgatgtgtggagtgtgtgtgtatgatgtcatgtgaagtatgtgtgtggtgtgtgattagcatatgtgtggcatgtgtggtttgtgtatgtgtggcatgtggaagtgtgtgtctgtgttatgtagtgtgtgtatgtacattcttctgaggagagggttcactgctttcctcaaacacccaaaacaaacagcaaagagccttggctttaggatgaaatggggaacttggcacaggtagaccagggttatctttctgcctaatttaaaatatctgatctttttgggtaaatagcaacatatgcctggagttataaattgcaacttggctttacagtgtgtctttcgtcagttcagactgctataacgaacatcgcctgggtagtttataaacaacaggcatttattcctcacatttctttttttttgtttgcttgtttttttgagatggagtccactcttttgcccaggctggagtgtagtggcacaatctgggctcactgcagcctccacctcccaggttcaagcgattctactgcctcagcctcccgagtagctgggattacaggggtgtgccaccatgcccggctaatttttgtatttttagtagagatgggatttcaccatgttggccaggctggtctcaaactcctgacctcagataatccacctgcctcagcctcccaaagtgctgggattacaggcgtgaaccatgacacctggcctagttctcacatttctagagattggacagtccaacatcagggcagcagcagattcagtgtctagtgagggcctgcttcctcatagacagccatcttctcactgtaacctcacatggtggaggggtctttctcaggcccctattagaggagcactaatcccctgcaccagagctctgcccttgagagctaatcacctcccaaagaccccctaataaccattgccttggggttaggatttcaacaggccacgtgaggtggctcatgcctgtaatcccagcactttgggaggccgaggtgggcagaactcctgagctcaggagttcaagatggcaaaaccctgtctctactaaaaatacaaaaattagccgggcgtggtggcacacacctgtagtcccagctactcgggaggctgaggcaggagaatcgcttgaacccaggaggcagaggttgcagtgagctgagatcctccatctcaaaaaaaaaaaaaaaaaagaaagaaagaaagaaaaaaagaaaaaaaaacagaaaaatcttagcttgggcttgggctgcctgctgtgaggggaagcgcccatcaggaacccatgtggacggtgtctctctcagaactcccttccctgactccctttttatgcctctttccttgtttacctgactccctcattctttcttcttctcttttcttccctactcagacatagcaaagaatggagtaggctctgagatacccatgagcgctgctgagtggacatagcatcctgtcagtcccctgagaaccggcattcacagtccacccagcactgacaacagtgtctggtacatcacagggctcaacaaatagggatagaattgtggtctctgactctcatttccttcattttccaccttattttctacagtgttgtatttattctccgtgtctctgatgctgcctcattctaatgaggcagggcagagaagtcaatgaattggcgtgtggctggatagatttttctgttctctatttcttagctggcacacaagaccttccttccacaatctgacctccagccacatctcccatgcttgacttgaacctaccccaaatacttttccccaaacatgctattcttgtcctctgatcttttgtgcctgctgttttttgttttttgttttttcttttgagatggagtctggctgtcacccaggctggagtgcaatggcataatctcagctcactgcaacctccacctcccaggttcaagagattctcctgcctcagcctcccaagtagttaggactgcaggcatgcacctgtaaccatgtaaccatgcctggctaatttttctatttttagtagagacgaagtttcgccatgttggccaggttggtctcaaactcctgacctcaggtgatctgcccgcctcggcttcctgaagtgctgggattacatgtgtgagccactgcgcccggccctgctgttttatttgtctggaatgtgccaccacccaccccaggaactcctatctttcaagactggttaaagtactagcttcttcatgacccaccagaccccaaacagttaaccaccataccctgttgctttcccctgcaccttatatgccttcactttagtacttccttccctctcttgcaatctcgtgtaaatgcttggctaccctatcagattagcactacttgggaggaggaaccagatcttcctttctgaatccgttggactcagaggcagtagcatgcttgagctagctcctaccagctcaagggagctggtgatgtgtagctcttcccaactctgcgttcagttatatcacattagcagcttgaaattggccatggaattttgtcccattgaccatagcattttgtcccatggaagctgacaaacactacaaatcaaggcatccccacaaccaaagctggtttacctgcaaactgatacagttaaaggcattcagtaaattggcatccaatagattttgtttttgttttttgagacggagtctcactctgtcacccaggctggagtgcagtgacgtgatctcggctcactgcaccctccacctcccaggttcaagcgattctcctgcctcagcctcctaaatagctgagattacaggcatgcaccaccaatgcctggctttttttttttttttgatggaatctcgctgttgttgcccaggcgggagtgcaatggtgcagtctcagctcactgcaacttaaacctcccaggttcaagcaattgtcctgcttcagccttccaagtagctgggattacaggtgcccgccaccacacccagctaattttttgtatttttagtacagatggggtttcaccatgttgacctggctggtctccaactcctgacctcaggtgatccacctgtcccagcctcccaaagtgctgagattacaggtgtaagccactgcacctggccacatccaataaattttgaatgggcaaatgctttatgctctggaaaatcccctcaaattaaagtcagctactttttactcatatgggtaaatggctttcattgacttgtttttctatattctcctgccattggttagggcctagcctttgaatttaacacactaggacttaaacattaatacgtaccagaataacttgaggacactagtgaaaatgcatattctggccaggcgcagtggctcatgcctgtaatcccggcacttcgggagtccaaagtaggcagatcacttgagctcaggagaccagcctaggcaacatgggaaaaccccatctctacaaaaatatacaaaaaataattaaccaggtttggtggtgcatgctgggtgtagtcccagctacttgggaggctgaggtgggagaatcgtttgagcctggggaggttgaggctgccatgagtcacgatcgcaccactgcactccagcctaggtgacagcaagatcctgtcccaaaaataaccaaataaagaactttaaaaaatgcatattcctgggcctgcccttagcaattcagattcataggaatctgcattttatcaagaagcctaagtggttataatgaaaggtgagcacactaaaatgctttgacctttatgccagcattcttctccatggtttaaggactcaggacagacagcaacaattaaaatgtttaagccaggcatagtggttcatacctgtaatcccagcactttggaaggatgaggtgggtggatcacaaggtcaggagatcgagaccatcctggccaatatggtgaaaccccgtctctactaaaaatacaaaaattagctgggtgtggtggcatgagcctgtagtcccagctactcgggaggctgaggcaggagaatcgcttgaacccaggaggtggaggttgcagtgagccgagatcgcaccactgcacttcagcctggtgacagagcgagactccatctcaaaaaaaaaaaaaaaaagtttaaaatcctcattttgagattcgcgtcagccaccctccttccccttccaccaacccttaactggagctccctctctgctgtcctctggcagaggcttaaggggagacaagtggccagggagatggacagagaaagcaaaggtgtgggtgatgcagacccggagtgtctactgtgagctggtgggagactggagactcttctgtagaaactctcagaaaaagatgatcttggatgcatgctcatcagatgaacagttagttgtgtgagcccaggagcttcaggatgggggtagcagcagcaagtcatgggtagttgcgccaaggttcccactaagcagaacagcagggcagtgatcacagcgtaaaagagcactgggtcaagtctagagaggaaggctaaggggaacatcatagaccaggtggcagtgatcaagtcagctcaagcaggaaggttcaggccaaggccaaggtcctggcaggcaggatgagccccagatctgaagaaatgtacacaggagtgctcgtcctcgggcagaggctgtttgcctgctgctcacctgaatgtgcattatgaccttccagccgtgggcggcaggaggactctgcggggacagctttctcccagctggggcaggacccggaatccaggcctccttccagctccttgcagtcaataaagcatgttacctccttttctgttcaggctttctagaaaccgggtgtagggcagggcccctgaaactcctcagccctgaagggtagactcttttttctccaggaaatggccagtgatgaactgagggagttgaggaatgccatgacccaggaggccatccgtgagcaccagatggccaagactggcggcaccaccactgacctcttccagtgcagcaaatgcaagaagaagaactgcacctataaccaggtaaggacagtgaggggacgggccggaggtgcaggaggccgcaggggcatagaggtggaaaatcagagagaagcttagggaagagccagaggggagaaagcgttaaaactctctaggctttgccgggtgcggtggctcatgtctgtaatcacagcactttgggaggccaaggcgagtggatcacctgaggccaggagtttgagaccagcctggccaacacagtgaaaccccatctctactaaaaatacaaaaatgccgggcgcggtggctcacgcctataatcccagcactttgggaggccaagacgggcggatcacgaggtcaggagattgagaccatcctggcaaacacggtgaaaccccgtctctgctaaaaattcaaaaaattagcagggtgtggtggcgggcacctgtagtcccagctactcaggaggctgaggcaggagaatggcgtgaacccgggaggtggagcttgcagtgaaccgagatcatgccactgcactccagcttgggcgacagagtgagactccatctgaaagaaaaaaaaaattagccaggcatggtggcacgtgcctgtaatcccagctaccctggaggctgaggcaggagaatcactggaacctgggaggtggaggctgcagtgagccgagattgcaccactgtactccagcctgggcgacagagggagactctgtctcaaaccaaacaaacaacaaaaagaaaacctctctaggctgggccagctcagtggctcacgcctgtaatcccagcactttgggaggccgaggcaggcagattgcttgagcctaggagtttgagagcagcctgggcaacgtggtgaaacgtcatctctgctaaaaatacaaaaattagccaggcttggtagtgtgtgcctgtagtcccagctactggatgcgggggaaatgggtggcgatgaggcaggagaatcactggagcccaggaggttgaggctacagtgaattgaggctgcaatgagctatgattgcaccactgcactccagcctgggtgacagaatgagaccctgactcaacaaaacaaagaaaaccttaaaaactctccaggctgcagagagaagggcaagccttggtacactaatgtggtgcacctgtggcttctagacaatgttcctctgagtttagaatcatccctgctatgtgtctacgaggcttggtcagtgtgttctggtctgccctgacgtgacaataagaagaatcagactcatggcggctgaagagtcatagacagttggaagggaacttggcaatgtgaaacccagctccctcattacacacccagggaaactgaggcccacacaggccacagatgggctttttagccttgcccaagaaaggaggccaatgtcagaggtagtaataaacaagatccacaccattctgcctgcaatccagctaacttggtcaataaagcctaagggctttagctctgagtcctaaagttgaagaccattgccctggcatggggaacttgggaaggctgtggaggccccttctcttaaaaccagagaatggcctcctctttctgggttgcacatggtatgcccttagagcacaaatatccttggattctaactggtgtctagtcattctagaactctattcagagttctccgtctgttcggcacacaccatttatcaagagcaccttgcctgcggcattctgtggccagggcagaaatgcagtcagccttgccattccggaggagtcccttggagaattccagttctggaatccggagatgtttgtgcaagcttctgctctctcccaagcacctttccgtgtggagtgatgcgcttcctgtgcctcacttctttctagaagtaaactgcccactagcaaagttttctctctgctcgtcactgctttccagtgaccaggctgcgctaagctgtgtccgcctggcagactgctgggctgctggggctcacccaaggagggtggcgggcataactcgtcccacaccacagattcccagctgacatcattcgtagctgattgtcagcaaagtaatgacttgctacatgtcgtggccagccaaggacagccttagaaaaccagaacaggagctgttaaacctggaaatgccagggctttactgtgggatacccggttcctgcacctgaatgatgaggctaagaggatgagaaaatgtaacattaaatagtcccaatgatatttaggactttccctctctgggcctcaggtcttccaccagtaaaataaggaagatgaactagaccgctaagcctgcttgcagctcactcctgtgaacttgtccagtaggatgtgttcaggggtgagtcagggaatacttcctgtaggagataagtcttgaggcaagagaagagaggtctgttacaaaagatcaacaagagtgaccaacaagagtgaaagtccaaattagccgggcgtggtggcgggcgcctgtaatcccagctattcaggaggctgaggcaggagaattgcttgaacccaggaggtggaggttgcagtgagccgagatggcaccactgcactccagtctgggcaacagagcgagactccactgtcaaaaaaaaaaaaaaaaaaaaagcggaagtgcaaaaggccaggttaagccagtaagatactgggagtgagctgatggactgcctgccagaggagaggaaagcataatactaatattatggagttgtcagtgataaggaaattgccagcggggggtgggaatctcagtgccaacctctgggatttggacctactcctaaagacagtgggagccatggcaggtcctagaacaggggagtgacttcatgagtggttcttctctctctcaggtgcagacacgcagtgctgatgagcccatgactacctttgtcttatgcaatgaatgtggcaatcgctggaaggtctgtatgtttatgtatttcccccttccctgttatccacatacctcgcccgcataaggcgtagtgtacccacaacccagaaggggccttgtgcatggcagcacttgccagcctgcacagagtaggtctgcagagccagagatagtggcggattgctgttggggaggtggggagagaacacacatgcatgttttcattttagaagggcaccaagctggggtgggggcagcagcccacattttatcacaggatgagcaagtctgtcatttgagcacagatggaatcggcttcctgagatccacagaggagaggaaaaacattctgcacttggaccacgcctctttggaaagtgcttccacagatggtatttcctttgaacctggccacagccaaggatgggaaacaggaaggctgagccctgtcagaaaggagttgaacctaaatgccaccaggccatccttccctcctaaggaagctctgaaagtcttacccaagtctgtaactcagactgccccagctcctgcaaaggcagaagttttgttttcacgcatgggagccaaacaaagactcctcccagagtgctccttcctgccaagtctcctgaaggaacagagtgtggtcacgtgcctattgtcagtttccaactgctctctgacttgcatgtgcaccatgtgatgtctgggccaccaggcaggctgcaggtgctccaaaagttctaaggtacttagcaagaagtacaagataagtcaggatccctggtttcaggtcccattctgccctactcatgctgagcatgttactcacctcattgagcaaaagagtaataataatgcctttctcccaggtttgatgatgtgaggatcattttgatatgagggttatcatgtatgcataaacactttgcaaacaactacaagaattgttcctttataatgttattcttactttcagacaaggaaattgaaatacagaaatagttaataagcataaagccacagtttggagcactgaaagccgatgctccgacttcctgatcaattcttttactttttttttttttttttttgagatggagtctcgctctgttgcccaggctggagtgcagtggtgtgatctctgctcactgcaagctccaccccccaggttcacaccattctcctgcctcagcctcctgagtagctgggactaaaggcgccggccaccacacccggctaatttttttgtatttttagtagagacggggtttcaccgtgttagccaggatggtcttgatctcctgacctcgtgatccgcccgcctcggcctcccaaagtgctgggattacaggcgtgagccgccgcgcccggcctctaattatttttcttactaaggacctcagtagcccttactggggcctcattagaactgccatattttttaaggtaaaaaccagatgattatgtattttttccttttttcacttattgagcacttagggatggggccagtatagtggcctactggtttagagcatgggctttggcatcaggctcaaatcctagctttatcccttaccaagtgacttaactcagtgacctgaactcactaagcctggatttcctcatctataaaatgagggtattcatatctagcccacagagctgttttgaggagtagagaaggtaacacacataaagcattaacagagcctctgagagctcatatggcatctttgtcaaattagaaaaaggtgtcccttcctccaggcggcacagcctcatgccagggtacggagcaaacagagcaggggctacgtttcagcctcagcttgcccctttggccaggctcttttgtgcagtcaacaaattatacaaccatacaaaaaaagccctgagtacagacatgcctggtacataaaaccactattcttactattttgggtatgtcatctactagtattacgggagtttgggcaagtcacttaacctctctgatctgcttccttacctgtaaaaataggagtgataggccaggcgcagtggctcgtgcctgtaattccagcactttgggaggccggtggatcacctgaggtcgggagtttgagaccagcctgaccaacatggagaaaccccgtctctactaaaaatacaaaattagccaggcgtggtgacacatgcctgtaatcccagctactcgggaggctgaggcaggagactcgcttgaactcaggaggcggagattgcggtgagccaagatcatgccattgcactccagcctgggtgacaagtgaaactccgtttcaaaaaaaaaaaaaaaattgggagtgatattagtgcctatctcagagtgattgtaagggtgaaatgagttaatacatgttaatactgcctagcacagaataaatgctcaataaatgtagctcttgtgattttgttactgttagagaaaggacattctgaatgctttaaatccagctcctcttccttgactcttactagttggagggacaggatccactagaggtaacaactacagacttctgaacacattttcagttggtctccgttgccatgtgggagaccaaaagtctaaccaagtgattagtagccatcccagtgatgttcttgaccataaattgagagctcagcacattcctggcaccgaattgccattcatttattacctgatatcattctcacattcacaagctttatgagctcattttacaggtgagtgatttgttcaagatcacacagctaataatggcagagctgggctttggactctggtctgtgtggctccagacaccaccttctttttcatattcccccacagcctccttggaggatgccgagaaacctttcaaattttgttgcctttctggttttgtagttctgctgatggaacagccagccatgaacaaggtgaggaagaagaaagaggaagcgctgaattatctgaactggagaagcaataaaaattaaagtgaaggaaaatactgaactctgtctgagtgggatggtatgagttagaggaagaattctcttgcaaattaataatcggtcattagaaacaattggttaatgggggagcctaattggagaatgatgctgagaatttgtattgatgaacctcttttagaaactgcagagggctgggcacggtggtttatggctgtaatctgcaaactctgggaggctgaggtgggagaatcgcttaaccccagaagtttgagtccagcccaggcaacacagcaagaccccatctctataaaaagaaaaaataaagaaactgcagcgccttaga

SEQ ID NO: 728 - DNA, 3058 bp, Homo sapiens
tactggtgccagaatctcttactgtcaatgctcccaaaactcaccgcttgcccccaccccttttgcttaaatgacgtggttcttatctcagatcctgatataaagctcctacagctacctggcctgagaagccaactcagactcagccaacaggtaagtgggcattacaggagaagggcgtctctaacatgcactgtagatctaaaatcttcgggaagatacagcatgagtttctgtccaagaggttttagctgtaatgaagcctcagtgggatccaaagttgtttttcagttactgagtctgtataatccccactctcaagagaaacatttgaaggtgtgggtgtctcagaggaccttcctggtctcagaaattctgagaggaggttttaaggaaggtaataggtgctttgctctccatctctcagaacccccttctctgtgttctcctatagagattgttgatttgcctcttaagcaagagattcattgcagctcagcatggctcagaccagctcatacttcatgctgatctcctgcctgatgtttctgtctcagagccaaggtaagatctcttttccaccaaccaactctttctagccctgaagacttcactctatccccaagcatacgggtctacttgaaaaaaaaaaaaaaagcagagtcactgttaagggttgttttgtggtgtttagtgatctttattgctgatctcttcacatttatatacatccacacctcattaaggagttggagctagaatttaaaatgaccccttataagcaactgctgcagttggcatgagtttatctgattaaatttatacgtgatggtggatttggggatgtctgtgtgtagacagtcactaatggggtggagaactgaagagagccttgtgttcagggaaaccaagtcaggcttgagaaagtagaaggctgagtccttcaaggtagaagagcctgagctccagacataaaagggaaactggagacttgtttctttggcctattcattctgttttttttcccctgatcaaagaaaccaaagacagaagatgtaggatgcaggagcaatagtgagcagtcatcccataatagactggattcttctgtttctataaaggaacctcagaagctcttacctcaccttcaagccttttccttaccctgagagcctcctttaattgtctcttctttttcaggccaagaggcccagacagagttgccccaggcccggatcagctgcccagaaggcaccaatgcctatcgctcctactgctactactttaatgaagaccgtgagacctgggttgatgcagatgtgagtgaggagagcagtgtgggaagggagactcatgaagggaggggaagctgccactctccagtgtgttcagtggctgcaatgagatgagactgaaccccttgctatactatcatcagccccaaactttccaatctactttatcccattattcagcacattcccagcacaaagaacctggtggtcagtgacagcatcatcacggacattactctgctgtcctttttctgacccgtcctcttggaggactcagtatatccgtcacaacttcctcctccactgagtgctccattttcttctgcaacagctctattgccagaacatgaattcgggcaacctggtgtctgtgctcacccaggccgagggtgcctttgtggcctcactgattaaggagagtggcactgatgacttcaatgtctggattggcctccatgaccccaaaaaggtaggctgcagccttctttatctcctaatgatcaggtttgagaagtaagaaggaggttcaagttctggtctcttaagtaccagcttttatcgctttccagaaatcaggctgtttacagatcctctaatgtcctgtgtagcaaggtgcactgtagatgattggagatataagtggaaggctgaatttcctaggtgttcttgtcattcatgaataaacttattctgttttcagtcaacaaagcatctttatgcaccaacttcttacctattttgttactgtcagagtcacaagagagactagattgccgactatataggaaaggagacttgtggtaaaaatctgctgctgtactgctggcatttgggaacctggtagtatactaaataatataatatatcaacaactaatggtcagccaatgctatgctggatatgagggtcctgggccacaaagacaaaaaatcaggaaccactttttaagtgagatactttgggtctctgtcaaattcataacacttatttcttggtggaatacagttaatgagttggacagttcaggaaagaagtttagagcaatagcaaaggaaaggaaacaatatttagcaaggtttattcttcctttgtgtcttagcatgtttctgagtgtgcacacaggcccagtgattccatgtatttttgagtgaccactgcctctgttctggcccttccccatctagaaccgccgctggcactggagcagtgggtccctggtctcctacaagtcctggggcattggagccccaagcagtgttaatcctggctactgtgtgagcctgacctcaagcacaggtgagaggcagagaatccatccacctgtttctgttctctcctgcttagctccagggatggaactgggactgggatagaggaaaggtgaactcctcattaaggaaatggatgtttggtttttgtcctgagtcctaaagccaggagggtcatactctttcgggtctcccagttgtaactcttctcattgacttataggattccagaaatggaaggatgtgccttgtgaagacaagttctcctttgtctgcaagttcaaaaactagaggcaactggaaaatacatgtctagaactgatccagcaattacaacggagtcaaaaattaaaccggaccatctctccaactcaactcaacctggacactctcttctctgctgagtttgccttgttaatcttcaatagttttacctaccccagtctttggaaccctaaataataaaaataaacatgtttccactattgtgctgtc

SEQ ID NO: 729 - DNA, 23408 bp, Homo sapiens
agtcgcctcccagatgagcactctctcagaccgctgcgggccgccaggcgccgggaatgtcccctgaatgcgcgcgggcagcgggcgacgcgcccttgcgcagcctggagcaagccaaccgcacccgctttcccttcttctccgacgtcaagggcgaccaccggctggtgctggccgcggtggagacaaccgtgctggtgctcatctttgcagtgtcgctgctgggcaacgtgtgcgccctggtgctggtggcgcgccgacgacgccgcggcgcgactgcctgcctggtactcaacctcttctgcgcggacctgctcttcatcagcgctatccctctggtgctggccgtgcgctggactgaggcctggctgctgggccccgttgcctgccacctgctcttctacgtgatgaccctgagcggcagcgtcaccatcctcacgctggccgcggtcagcctggagcgcatggtgtgcatcgtgcacctgcagcgcggcgtgcggggtcctgggcggcgggcgcgggcagtgctgctggcgctcatctggggctattcggcggtcgccgctctgcctctctgcgtcttcttccgagtcgtcccgcaacggctccccggcgccgaccaggtgagcgcccctctgtgtgtgccgggcaggtgtcctgcgcaggctgggaagcggggccccgacggaagctgggatgaggatgatcaagaacaacaatagccatttattgcacttaatcgttgtgccaaatcttgtgcccatggctgtgaagtttaatctcttaaatctcactacaacgctgtgcacacgccctcctaaatgatgtaagtggagtcccccaaattcttgcaaaatgcaatgactgttgcgaggttaattaacgagtagtttaggagcgagacggaactttgggggtgcagggtggccaaacactttgtattgaatcatgattcctcgccaggtgctacaatactgttattatcacacccatttcacagatgagaaccagaggcacaccgaagtgtataataacttgcccagagtattttatccgtaattcgaggaggagatgggctccttccagaagtttacccgtaattcaaggaggagttgggctcctgtccagggttgggttatggtcctgctttgaaagcgcgcggacaggcatgtgagacccggggaccccagatgcaatgctgtctttaggggacttgtgacagaattcccttccggggtcttcagttttttcagctgcaaaacggaaggattacactagaccttcgaggtgtcctgggcgcctgaaatgtgcagattacagaggctggaccgacgagctctgttttacatagcgggtcaatagttgtcattattagctcataggggtgggagtgaccatgatcggaataaggttctgcggatagtgcaggacattggctctgttcccctcaagtcccgcggtccggaatcccgagctcgggtctttttctcttgccgctttgcccggtggttgcagggttcgtgcgccgggatccacacggaagagggaatctagacgcggagtcacggtggaggacagtggccgccgtctggctgtcttcccagtgtgtttggttctccatgcctcgcggagagagatagagaaaggacttaggtctgtgcgctgggggctcagcctccaggagcttctgcccgtggctgggttcttggcctccccttccctgccggggtcactggttttccggcctggaaccccctacccttaagctccctctccacctaggagtgaatatggggcgccctgagtaatcgtggcacaaacaggaatcacggtcccaaagagggaccttcgaagtggtcagagaggggagtagggagggagaaatgacatgtcaccaggggaaggcttggttatggagatgcacacagcccaccagggacaccccctgactgtgtgaccctccagagcctgagacagagaggtggagcttctctgggggttttcccagaccagtctctcacacagcccttttattgggggtaggatggatggagtctgcctcctgtatcctgtgcgagatttttttttttaaacataaatcaaacttaaacacttgtttctaatgcttgtgtggaatacattgtggggtgtttgtttgtttatgagcttgaatgactaataggcaggagccccatcaagcctgtggcacttgatcaaataacatgcaagcttgtggccatgtccactcaagtggggcccagagaagccaggattagctgagctggtgggtgccatttatgggcagaccaagggctctggcttagtggacaggcttgttcttagcccacacacacctgagaatcaaggtgggccacgcagatgcctctaaaagcaaggatcaggagggggctgggcttctgccatcagtttctttgatttttttaaaagttattctctcagtgagtcacagtacttctatatttctcacagaacttgaggtatttcacctcattttctttcttacaggagaaaatgatgttcagggaatgaaagaccagatagaatgtatcttgaaggtatcttaagttttcagatgtgtattttgtgcctctcccttttttcagtgatttcaagtataaccctaattaattggcaaatgacattaaaaaataagactcttgtcacttcccagccagagcccagactaaaattgtgtgctgacagggacacaggtgactgtttgggtgagaaggccttggcataggcaggggccttccatgtcttggccacttagtaccgcaccactgttagggaatctgggtgtggttagagccctctgtggtgcttccagagtggccacagttgtgctgtaaggtgcttccgtggaggtctgtgttgtgatggctgggcacacagacctcctttgttttaatgttgaaacacttccttggttttaagcagcttcggagagggatttgggcaaagccactgggagagaatgaggctgcagtgtgcactgggggccaggtgagttagttacccacaggagccctactcactgaaattagtagaggtgaggtgggaaagcttgaaattaaaaaaaaaaaaaaatccctgggcatgctggctcacacctgtaattccagcactttgggaggctgaggtgggcggatcacttgaggtcaggaattggagacaagcctggccaacgtggtgaaaccccatctctactaaaaatacaaaaattagctgggtgtggtggcatgcacctgtagtcccagctacaagggaggctgaggcaggagaattgcttgaacccaggaggtggaggttgcagtgagctgagatgataccactgcactccagcctggccagcaaagcaagactcaatctcaaaaaaaaaaaattttttttaaattaaaaaaaatgggacaatcctttctggctctccatcttctttgtcttctttcctacctgtctgccacatccacctcatctctctctctctctgtctctgtctctctcacacacacacacacacacacactttcacacctacctgcccaggaacccaacaaacagaaaaaacccaatttcctaagggttgttgcctgaatacatagaaaacatccaatattataggttcagcagttgaagaaataagttgaaaagaatgagagacagaaaaaaacaaagggggagtgtagtcattaaaaaaaaaaaagcaacaggaggatctggtctagactgactgagtctcacatttaaaattagcaaaggcttgttttctcaatccccatattcccagctttctgcttgtggattctgtctgccccatcccacttagagactaaatatggaggtttgggatgggggatattttcctaacccaaaccacacgctgagagaatcaaccaagcctaagcagatactggctccctcccctcaaggagcgctggccaaggaaactgccccttagagcttctgccgacccaagagccttcctgaaacagaaactcaatctcttgtccatgtgggctgtgggtgcccagtagttcatggtaatcagactctaaaacttcactgaagagaagatgaggtgataaatatcctagaaatgtgagacaacttggtatttggagtgggctttggagtcaaacattctgtttaaatcccatctctgccattcgggagcttcatgacagaatccaagctgtctaacctctcaatacctcactttcctcttctgcaaaatgggcatgattacagtatcaaccaaccttaccggatcatcatgggcactcatgttcagtaaatgggccaacacctggcacatacacagttaagcacataagaattgctagctattattagtttccttatctttgaacatagacattttaaacattcttcaaacagtataattcttctgattgctgtaaaataacagactgccattttaagagggcgaacacatcctagcaacgttgacatctcagccaggtcagctcaccctgcttcaacaggattccagcctgtgtgtgctgtggacctggctgggcagtgacccacatcggcaggtggagaagactgtctatcctggccagaatgtgctgcccattcattctgcaaacatttactaagcacccttcccctcttgcccctgccacaaatcacgtaaatccacctccttctcttcaaggagaagcacacagatggtcctagattctggcctaatttggtcctcacagtcaccccaccccatattcttttgtttattctaaaagaggaaatccctaaggtcacagaattgcaagagatggaaccagaatttagccccactcttttgggtccctctggataccgtcacccttgggtttatactcccttgcggcacttgatcccactgccccaccctaccctaatttaataccaggctagtcatgtgaacgttcatgtgtctctgctgagtgtggattgtctgaggaaacaaacacagtttgcttgcttttgttatgattagagaatacttttgaaatataagaaaggaagcatctcttgcattaatattttctctcttttttgctgggaagctgatagaagatgaaatatccaactaggactcctaggttcttaaaataatcttgaagtcttccatgttgatggcagaggtgagacacaggaacaaggatctaccaagggtctccagaggtactgcaggaagaatcatcagagagactgataggcaaacagctggaacaaacagctagaacttatttgcaaacaggcagtgtttgcaaataagtcaggcagtgtggggagggtcagcatttccacagtgcctgtggacagatgtccccatcctcaaggggagtctccttagaaaagtcatttggcaattttgtcctgagcacctaatgtgtattaggcagaattctaggtgctgggatgctggctggaaaaaggcaggcttggtccccacccttagtaacacacttcagtggggactccagacagggaaggggatgattgcacaagctttggagagctgtggaaaggtctctgctgggtgtggggagtccaggaagctactgggagatggcagtgtccccactgagtgtgaagatgagaggaagtaaaccaggcaaggggatggagacgaggaggacattgtaggcagaggagagtccacatggaggccaaaggagcagtgagtgctgttctgaaacttgcaaggggttctccaccacacatgtgtagagcctgaggttcagtgggggcaaaagacggtgctggaagcgttggcagaggagagggagaaggaccagagtcatcctggtaggaagtttagacttaatggtgatggcctggtcttggtaagggttgggggtaggccagtgaaaatgcaataggtggataagtcaatggctatgaaggaggaatttagagatcccttctgagtggggaggaggaggtgggcagaaggccagtgctcaggtttctggcagcttggagaatggtggccctgtgccctgattcagggagtgcaggaatcaggtggaaccatttgaggatgggaccttcaaagcttaatgcgcctatgaggcctcctgctgagatgtcctcatggctattgggcaagtctggggttcaggaaagcatgcagctgaaaagagtagattggagctttacctgcaaaaggagccgtggaaatgagtgagatggccagggagaagtggagactgggatgaggcagaacacatttgggggatccaagtcacacttatcccttcactgtgagtggcctcccaatttcatcccacaattctgctctgacagctgagctccagcctccctatgcccctggccgcggtccttccaggcatagcagaaacaaccccccctgggtggctctaccctctctggtcctctgaagctctctgggcacttccagctgcttgtcctgtcctgaagtgtcctagcgcttctctgcctccctccctcctggaggaaagggccagcgccttgctcttcctcactgtggcttcgctgtggtcagccaccacgtctggagtcgggtggttgagcaaatgaattaaagaagactattgttgactctgccaattctgcttctgtaactcagtaacaaggcaggcctgccacttttgttttccaagttccctttttaaaatcaggggacatttcacatgtgcagaaaaagtacagagaatataataggactcacatccccaccttccagacttgacatgctgcctaactcctctacatgtcacagcctgcgggagaatacctagaatcaaaacgacttaagccaaatggattttcccacagaaaccaagttatgacaccaacttggatctctgtgggcatggcacctgttattttattttttaatgagaccagacagtgcatttagtcaacaataccatacaaaaccttctaaagagcatgtcaatccatcattcaggcccccaagccagttgcactgcctctcagttcatgtgtgggggtgccaggcagagttcttatcttacttccttatcacacttcctgccctgagcaagagccacaaatcaaaaggagaacgagcgtctttattaaagtcacggaatttgggagctgcctgggacaggttcattgtttctgttgaaaaatagctggtaaagttggcagaactatcatggtggtctgtgtttcatgtttgatcatcatttcacttataaatgaacttttttcttttataaaagtaatataggcacatcatggaaaattaggaaattcagataagccacaagaataaaaacaatttgagagtcctgcctagaaatagacacttcactttctggattgtatccttccatgtttttttctgtgcatgcgagcacgtgagtgtatgtgagagagaaagtgtgtgtgtgcgtgtgtgtgttggatggccatatactcattcacacatatacattctcttcaacacactgggatcatagaagcacatggtttagggacctgcttttttctttcactcctactgtagagagaacaccttgctctatcattataccctccacaaaagtcttgctaaccctggagagattttggcagacattctggaaaaggcttttggaaagagttgggggtcttaagaaaagcttctgtgtgtcctctgtttttctactctcccttaaaatttttccatcacaagaataggaatgagagaccaagtcacattcagggctggaatccatttcttccgattgatgcttcagcatacctgctcatatgtattgctactgctgtcttggaatgaggggtccatagtgggcagaggcctgagtacaaaaggaggtggtgcgggttttctggagagcagtagtagcctcactgccagtaatcagaagatccttgaaagaaacaggtttctggccgggcatggtggctcacgcctgtaatcccatcactttgtgaggccaaggcgggcggatcacaaggtcaggagatcgagaccattctggctaacatggtgaaaccccgtctctactaaaaatacaaaaaaaaaaaattagctggtcatggtggcgtgctcctgtggtcccagctactcgggaggctgaggcgaggcaggagaatcgcttgaacctgggaggcggaggttgcagtgagccgagatcgcgccaccgcactccagactggcaacaaagtgagactctgtctcaaagaaaaaaaacaaaacaaaacaggtttctttccagtcaccaaaatgtggaaggatttaatgaacttccccctaccatgtgttcacaccagcccagtcttgattcactgctaaaaattctctgcttttgcctagtagagcgttcaatgaatattggtcaagtgaatgaatgaatgaatggtacttcagatgatcatgctactcctagacattggttaagatgccttggcccttcaaaatcaataacgtggtctttttacacagcacgtgctcttaaaaataatctattctatatgtgtgtgttagggccacttgttttctagacagttttgtttctgtagtcaagtgggcataggaagtttatatgtgggaagttagtatatacagacacacagatatatgtctgttttcattggcctatttattcattggatgaaattgttgcagaagctatttgtaactattcagtaaggtctccatatgttgcagttcttgcagttagtgttaaacatttggatcaatacaacatagtgatagcagcaagatcacaaaccttcacattcttctgccatattccattggttttacatcttgaactgtctgtgagtggaggctgatctttgccttggggctctagatggccaggttgatgcagctcgacacactttagacacctgagcacccccagcatgaatacttaatgctttagcaaagaccctgtgtccttcagcttacacagttgtgactacagggaaacctcgttcctgttttgatatgtttgttatgtagcatgtcctttccgatctctgtaacctttcaggggtcagttttctcctttgtaaaatggcaggcttggaagagaaggctcgaaagccctttgcatgtcagcccagggaagtggaaagaccacacctaggaaccgactctagctcttaccaccctgtaagcctgaggctcagttgctgtccctggagaacagaaaacataatcatggctattctgagggtcaggggcaagtgctttgcaagtgggattgtggtgggcagtgggagggattctggggttcactgtcatgctagttgtgtaactgggcaatgcaaccgtgtaagtgtcaggaaaccctcaataagactgagccagaggccaataagaagccagcatttacatgatgttcttttcctttttgtaactaggaaatttcgatttgcacactgatttggcccaccattcctggagagatctcgtgggatgtctcttttgttactttgaacttcttggtgccaggactggtcattgtgatcagttactccaaaattttacaggtatgttttctgcaagtgctgccactgaacttcacccaggcttggggttatttctgctagaatcttagaatttggggtcggagaacacctaagagttcacgccagctcaatcttgattcactgcccaggtctacaacactgaggaaggagaggatttttttagaagttatatctttgtgattatgtttttgctcatcactaaagtaatactaggtcattacaaaaaattaaattaaaatgaaagcagacacataaatgtaaataacacagaaactgaaaacttactctaccttcttaacaattcaagatgtattttttcaggttatttttcttataagcttatgtatatgtcatgtatactgtgtgtgtatttgatgaaccatatgaaattgcaggttaaaatggtcaaatggttatctgacactgttcaatgttcttttcagatatgagataatactctctgctctgtaactccttttttcacttaacattatatcttaacatctttccacatcattcctatatctctaactcattatttttagtggctacagatatgacttcatttattttatggtcttttaggctgtgtccattgtttccccatcgcaaacactgcagtactggagaatgtatactttttaaaacattttattgaagtattatatacatatataaaaagcacactgagcataggtgtaggctcaaactgagtgcattcatgaaagcagctcccaggtcaagaaatggaatattaccagaagtccctcctattatcttccagttgctactccacccacccccagggaatgcccatttcaaatgtgcactgaaacaggaaatgatctctacctttaaaacaaatatgtacagggacataaaaaggacgagtcagcctgttttatatctcgtaaggtagcccatttgtgagtaagttgcctgcccaggcaaacagcatgggtgcatccatgtttatgcccattttagaaggtttaatgcaaagcccttgaatcctcgtggaggtttatagttgttgaatcttggttttatagcatctcatgtgtgggtcatctggcaagtaggcacttgaagtggtgccctgtagggcctgctcactctctggtcacttttatggccctttctttgcagctaagggtctgtaaccttcttagacgctcagaacccatagccaggccaacctccatccaggtctgctaatccctgggtcctgtgggagatggcccctccatgtcactcattagactcttgcccacccaatgaccactaaagtgacacccagcctgaggcttgttcaagtgcaggaggcagattcaggcctggagttaaggtctggacagtgcttgcgatgggaccaggcatatgatagtgctatgtaagtgttagctattatcattaagttaaaaggaaagaggtgagagaaaaaggaagataaatgtagaacttatttaacaaatatttacatagtgttgaccatatgccaggaactgactctttaattctgataagaattacagatgaagaaacccaggcacagggaggttaagtaacttacccaaggtaacacagcttgtaagtggcaatcaggatttaaattcaggcagtctgaccctagagtcccaatgcattaattcctcagacatgtgttaagggcctgctctgtgcgaagtgcttgggggaagggaggtgggctaaaaaccgagcaagacacattctctatccagaagaagctttgacataaaaggggaagagggaggagacagacaagggtgctgatatcgaaaggagagaaactgaacacaaggtggaatgatactgagactttgcaaacactttgcaaactgttaaatgctacacaaacgtaagggacgaataaggggtataagaaagaagagcaggccaggtgtggtagctcacgcctgtaatcctagcactttgggagggtgagaccagtggatcacctgaggtcaggaattcaaggccagcctcgccaacatggtgaaagcccgtctctactaataatacaaaaatcagccgggcgtagtggtgggcgtctgtaatcccagctactgtggaggctgaggcaggagaatcacttgaacccaggaagaggaggttgcagtaagccgagatcgtgccactgcactccagcctgggcaacaaagtgagattccctctcaaaaaaaaaaaaaaaaaaaaaaaaacgagaaaaacaaaaggccatgaagacagacacagagacttgacagtgttattttaataatctgggtttgagtcttgaatctgccacttacttgctgtgtggccttggccagcttagttaccatctctgggcctcagtttcctcatctgcaaaatagcaaacataatgccagcagtacagagttgttgtgaggcatgtaggagatgctactgatgggacagagagagccatgcctgcctgtagcaggtgatgaataaattatgacggtcgtgatttgttaggcaaggctgctcttccgacccctgtctcagagcatgctgggaaaaggtgctgctaagatttgcaagaggataaacaacagcccagatttggagcacatcaagaacaaggaattgatgctagagcagggctggctggaaggggcggcagcatttgacctccttcctggaggtctcactcctgagttccttaggcgccaagagggctctggtctgccccttttcactcgtacctcacgcttctcagctgcctgctgaggaaggaatgattttccacccacccccatctttttctcaaggccagggtccacctggaaaaattctgagacctgaggagttggggcagctgtccttttagccacccacctctaaacagcagtttactctcgaagcaccttgtgtctaaacccacagccggccttcacttctccccattacagacctcggaacacctcctggatgcaagagctgtcgtgactcacagtgaggtaaaagggcactctgagtaacagagtaacagagcaaatatgtaatttacattccatcaccaccctcaccttaaggccctgtgtggtctggccccgctgccgttctcaccttcatatttcaccctcccttgtgtccacattggccttgaggctgtactgcgcactggccaccatactgctgccccagggcctttgcacctgccacttgttctccttgatctctcttctccagatttctgcatgggtcacttccccacttcatttagtttttactcaaaaagctcttcaccaaaaagtcttcccatcaatctccaattccttatcctgatttatttctcttcaaacacttactacacctgtcatattcaatttatgacagtcatctgtcttgcccactacaatgcaagctccatgagagcagaggttttggtttgttcactgctatattcctatgcctagatcagagcctggctcattcattgtaggtgctcaataaatatttgttgaatgaatgaggcatgagccttggatcacattgaaaggggtctacagggtcgtctcttcttggacagtgggaaaatcactggacaaagagtcctaagacagaagttctaatccaggctttatcactgtgtgaccttgggcaagtcacttaagtaatgtgaacctcagtttcgcaggagccaaatatgcctcagtggattaacacaataaaatgaaagagcagatatgataatgttttaaaaatcacaattttaatccaaatatcacttaaaaattactttccacgttattagcaaaatccactgttgcccatttcccaggaggactatgacatttgtcctcacttggtaccatgagtttgccaggctgataatttggaagcagacaagctataccaggtggatggagtgtgcaagcagggcctcagtttgcatctcctcccctgtgaagatatacgtaactcagagatactgagtcagcttttctgtccaagctttttctgtgaagcttggttttacataactctgtaaaatcaattgaacatcaatgttaattaggcataataacagacaattcacaaattgtttgacaccatgggatacaaacactacagcaccaccagtcccacttctcacctgtcactagttcctgtaacccaggtctcatctccaggcttgagaagtgtctctttttcacatcaccctggtcttctattgctctaaagcagtgtgtctcctagaatgctctgtagagtgccatggcaatgttaggtgttagaaagggtttgggaaatgctgggataggctagattggattctttgctgcaggacttctcaggacctttattatgccaatatactttgaggatctcccacacagtaatagaataggtatcattgctaaacgtgactacagaacccccttttctccacagagcatctctctgcactggtgctccaagaaatgcctttttggaaaccctgctctaaagtctccaccctccttcctggttctgacctgggcaagaattcagagcaggcttcgccctggctctttccctactgcccacccttcaggggctgcttcatgtgcttggagcagtggccttattcatccttctgccctccctgcttcctctttccttgtgactcaaacatgccatacatcttcaatattttttccaatcaacagttttcccaagggaataacctcccagcgacttctaagtgccttcggatcaggctgtcaccactgtttggggcttgcttgacgtcatcgcccagcaactgttgccatgacaactgagatgcctctacccttttgtaacagtggatgtttattgatccccctctcattgcccacatatgcaccagaatggaagagcagcgtgggtggagctgccttgcttattgctgtgtgtccagcacctatgagtgcttagcacatagcaggggcatataaatatttgtcgaataagtgagtctatggcttgcagatggaaaaccctcagcctgcctcagggctaaactgagaaacaaaatctgtttccgctgaacatgagggtgttagacagtgaacacaaagccctttctccacgcctgacctgcattccccagctttgggggcctgcatgctggtcgtggaagggtaggtggaatctctggaaagatggaattttctgtccagtgattctagaagggaggctgttgattgaccaagcagctcccagaggagactcaaccttcagggttgagtcccaactttgtcagtgggaacatcctctacccatccccacatgttggcagcagcggtctgctggcatggggtggcagaagggtgtgaggtagggtggagactaccccacggtcttcagaagctcatgtgggtgtggaggcagtgagtctcaaaaaggtctgtcctcaaaggactgaggggaactccagactgagtctgttgtcctagatgagcagctgcgacacttcagtgggcaagaatcacccggggagtttaggaaacttgcagatttctgggcctcacccagccccacacaatccgaatgtctgaaggggccccccagcatttgcatgtcatcatgtactcggtggccgtggaccacattccccagatgctgtccacctctgctgaggtgctgtgcctcaccggagaagacactggcacctggcatggggtacactcccctacttgactgtgaggctcaagcaaatcacttctcttctcagggcctcttagttccaaaactgcggcaaccacagaacctatcccagaggcttgttctgtggattaggattaatcctcaaaagttaattgagcatttagtttaatctaaaagcacatcaagcattctgcccagtgcagaagacatttgaaatcctggatcaatgttaattatctttgacatctagcatggggagaggaggaggagaggagccacatttgattataaagcccccttttcttcctcgcaccctaccagtggtgggaactgtggagagaaggagatagtagcatctctcagtgctaaaaaagatccaggccaggtgcggtggctcacacctgtaattccagtactttgggaggccaaggcaggcagatcacctgaggtcgggaggtcaagaccagcctgaccaacatggagaaaccccgtctctactaaaaattcacaattagccaggtgtagtggtgcatgcctgtaatcccagctactcaggaggctgagacaggagaattgcttaaacctgggaggtggaggttgcggtgagccgagatcacactattgcactccagcctgggcaacaagagcgaaactccatctcaaaaaaaaaaaaaaaaaaaaaatccatccacttaagcacttggtccatgagtgagcccactttgtctgtcacccgcagccattgtcaggtacctgctagggctctgggtcacagaagacacaggcatgccttgcttcagctcccatcccccaaggaacctgtagtctggtgggggtctgtgttagtctgttctcacactgctttaaagaactgcctgagactgggcaatttatacagaaaagagctttagttgactcggttccacatggctggggaggcctcaggaaacttgcaatcatggcagaaggagaagcaaggaccttctttgcatggtggcaggagagagaagagagtgagcaggaggagggaaaactgtcttataaaaccatcagatctcatgagaactcattcactatcacaagaacagcgtgggggaaactgcccccatgatccaaacacctcccacctggatcctccctccacacgtggggattacgggaattacaattcgagatgagatttggttagggatacagatccaaaccatatccgggtcagaggtaagagggacgcctgggccgggcgcggtggctcaagtctgtaatcctagcactttgggaggccaaggcgggtggatcacgaggtcaggagttcgagaccatcctggctaacacggtgaaaccccgtctctactaaaaatacaaaaaaaaaaaaaaaaaaaattagccgggcgtgatggcgggcgcctgtagtcccagctactcaggagtctgaggcaggagaatggggtgaacccaggaggtggagcttgcagtgagccgagatggcgccactgcacttcagcctgggtgacagagcgagactccgcttcaaaaaaaaaaaaaaaagtaggacgcctggacatctaccacatagtgtatgtggcaactgtcgcatgagtgcctgaaacaaaatgctgcaagatgccaagcgggagatgaaccaggaatccttctcagagttcctggcattagagtttggagttaaagcctgggcagaaggattcccatgggcagagatagtagagagtgggaaagaactagtttatgataaagacaatgggctggcgtcaggctgccaagttggcagtccacctcggcagcttcttagctgagtactggtgggcaagttttgtaagctctttgagcctcagcttcctcatctgtaaaatggggatcatcacagtacatatgtcacagaattgttgggagaatttaaaaaggtaaactaagtgataggtaagggcctggcacatagtaggtgctccataaatgtgagccttcatcaacatcactcatcaaaaagtatttttgcgacactacaccagggaccctgggtacattgtcgcccttcttaggatggtgtgggcagcaagagggatgaagctgctgtcagaatcagcccttgtgggtcccccagcctgtgcttaggcctagagcgatatccttactcagaggcggtaccaattcctctgcagcccacccacctgacaccctgcccaactgatattctcttagatctaacagccaaggcagcttccttagattaaccaggtttcaccggaacacaagttctagttttgattctacataatgacttccagacttggatgtgccaatatggcctctggcgtttgagcccgaggtggtgccctgtgtatcctgagcaaccttcaccctgcagagccattgaggggaggggagagctgaatagtgtggccatcccttttgagacttttgtaatttgtctcatctttaatcccactgagctagattttcagagatgggggctctgaccctgtattatcagtggagtgaccttcaacaagtttcttaaatttcttgaaattcaatttcctcatctgggaagtgggaacaatgatagtacaaatctagagtaggtatgaagattaaatgtgacgactgagaagtaaatgtgcggcacagtgccggccacacggaagccctcagtaaagctagagatctgtatgactatgaggctgttcactcagcatctgttgccctggtctccaccatcaacaggtggacctaaactcctgcacagagcaagcagccacattgaatcataaaacaaacaactatcctttaattagctagttacaagtttttgtttttttttttgagacagggcctcactgtgtcacccaggctagagtgcagtggcgcaatctcggctcattgcaacctccacctcctgggatcaagcgattctcatgcctcagcctcctgagtagttgggattacaggtgcccaccaccataccctgctcatttttttgtatttttagtagagacagggtttcaccatgttgccagggttgtctcgaacccctgacctcaggcgatctgcccgcctcagcctcccaaagcgctgagattccaggcatgagccactgcgcccagcctagttacaagtattctaacgggaatattttcagccattctgatcttgcagttaaatttacctgaactgtgaatgatgttaattaccttccattactccccctcttgagattcaggagtcttgggggacacctgtaggatctcctgaaagaagagtccagaatccccttctaagcccacataaccagggctgccttcattgcctgccatgcctctgcttcactgccagccctgctcattaatacaaaatattagaggtcccagcagctccactggtaggaatttattctactgacatgctcacctaggtgtgcaaggatacgcatgaggaggcttattcccccagttgccacctctcaacaggggacataaatgtaaaatggtcattttccacaaatatcaccagcagtgctctgacaagctcctctttcttgctggggcaggggcacctttaatgacacctatgtctgatttacagagctttccagtcattttttgattattttacaatgtcaatctcatagtcagttcaaagcttcccctgcccaaggcgtaggatgtgggtttgtggtgctggagctgggaggaggacagagaaggaggatgggctgccctggcagtggtctggtctcccacaaggacaaggaacttgcatgattgcccatatgaggtggttgcccccttctgttggtcattgcctctgatttccctgtgtctggtgatggtgccaacaggccctgttgatgaggggatcattcccaagcagcacccactccaacccatgggcaggcccttcccacacccactcccaccaggtatgggcagacccttcccacactcagcttcattttcaggttggctcctgacagaagctgccccagcaaatgagcagcctctgatcacatcatctttccttaacccctgactcaggggcctgtaggcaagactaggatccattttctcccgctcctgcaaaaggaaaggaacctagggtggggtccagtgctcccttctgcctggcctgccacactggtatgccatctcccactcaacaacctgtaggggagtgatatggtttggctgtgtccccacccaaatctcatcttgaattgtagttcccataatccccataatcttgaattgtagttcccataatgtcacgggaggaacccggtgggaggtaattgaatcatggggatggtttcccacaggctactctcgtaatagtaagttctcatgaaatctgatggttttataagggtctcccccttcgcttggttctcattcttctccttcctgccaccgtgtggagaaaggaaacattttcttccccttctgccatgattgtaagtttcctgaggcctccccagccccgcagaactatgagtcaattaaacctcttttctttataaattatccagtcttgggtatgtccttatagcagcatgagaacggaataatatagggagagaggggaagagtatgcacactgctatttcagctgctacctccccaaacaaggccaaagaaataaaatactcctcaataggggctagataaattgcaaccaccatttacagaagataacaagaatgaagtgccttctctgtgcagatatggcccgagcaccatgatatactgctaggtgaaaaaggagcaaggcccggagtgtggtgcgtggtgtgggcccatctgtgtaccaggtaaaagagcagatgcctgcaatcccacgccaggaatattgtgtgtggcagtggtgcatttccagaaagccatatgggaaaatactcacgttagtcacctcccagggtggaaatagagggtagagaaggccagatgttcttcatttgttccccatcagtatagcattgtttgagtttgaaccctaagcacattgtgcttgcaaacaattaaagagacatctcttttaaaaaaataacagggaagatgtccctcttgtagaccacccaattcaggcttttcacttcccctcataacgctgtttagaaggtaggtgattttctgctttatttctcaggagtgcagccggggtcccatttctccagcacatcctaagctcgggcacacaaagtcccagaggcacacagcttcagtgccttggggatagcagattccaactcttgggcccctaactcaaaatccccaacaaccctcggtcacctgtggctccagtcctgttttggttttccacagatcacaaaggcatcaaggaagaggctcacggtaagcctggcctactcggagagccaccagatccgcgtgtcccagcaggacttccggctcttccgcaccctcttcctcctcatggtctccttcttcatcatgtggagccccatcatcatcaccatcctcctcatcctgatccagaacttcaagcaagacctggtcatctggccgtccctcttcttctgggtggtggccttcacatttgctaattcagccctaaaccccatcctctacaacatgacactgtgcaggaatgagtggaagaaaattttttgctgcttctggttcccagaaaagggagccattttaacagacacatctgtcaaaagaaatgacttgtcgattatttctggctaatttttctttatagccgagtttctcacacctggcgagctgtggcatgcttttaaacagagttcatttccagtaccctccatcagtgcaccctgctttaagaaaatgaacctatgcaaatagacatccacagcgtcggtaaattaaggggtgatcaccaagtttcataatattttccctttataaaaggatttgttggccaggtgcagtggttcatgcctgtaatcccagcagtttgggaggctgaggtgggtggatcacctgaggtcaggagttcgagaccaacctgaccaacatggtgagacccccgtctctactaaaaataaaaaaaaaaattagctgggagtggtggtgggcacctgtaatcctagctacttgggaggctgaaccaggagaatctcttgaacctgggaggcagaggttgcagtgagccgagatcgtgccattgcactccaaccagggcaacaagagtgaaactccatcttaaaaaaaaaaaaaaaaagatttgttatgggttccttttaaatgtgaacttttttagtgtgtttgtaatatgatcaaatttaataaatatttatttatgactgttcagcaatcacatctcctacatataaagccacaccatagtggtttctgaagtgagtcttagaaccgattcaggacgcagatttctcctctgaagggtcacagccaccctgtgccctaccttggactcgcaagggtttaggatcattcgttgatgtcaagagcaattgaagaatttctaaggaacagttaaagatgacttacttttttttttttttcatttataaaaatgctatggacccttttaagagaatcggcatcatgaaatgagagagaaagtaggatggctctgaaatgtttgagagtgagttcaggagtggtttactcctgacgcatccagcagagatgcctcttaagcaccagccatggcagacagtgtcctttgtgctaggaatacagtggtgaaccagacagccatggccctctctcagggaacttaccttcgagtcaggggcagaaaaactaaataaaagtcaataaactatatctatatacagatacctatatatttgagatgagggtcttgctccaatgcccaggctggagtgcaacggcacaatcacggctccctgaagcctcaaatgccttggctcaagcaatcctcccgcctcagcctcccaagtagctgggattacaggcgtgagccgccacgcctggctacaagtcaataaatagtatagcatcacagagcgaataagcactgtgaagaaaatgggacgggggctatggtagtgatgggaatttagatcagatggggaggggcctaaggagacctttctgaggagtgacaaattggatcaaaaggtaagcgacaagaaagggccacctgtgtgaatgggggaagggacacagaagagatgttagtgcaaggaggctgacacgcttgaagggagagtggcgtaagccgactattgatggagcctcctctgcactaggcactgcctttaatgctgagatgaggggtacccggctggggcctgtcagttgaggccagagaaattgcagggttagatcacatagggcctaggagtttattctgttctccaagcccctggaggttggcaactggaggctgacgtgacctgatgaatgtgtgcaaagattaccctggctgctgggcagggaatagactctgaggagcatgagtgaaaatggagaccagttgggcagctgctgaagtgtgacatggggatgggaccttggaggtgagtggcattagggagggattgtgagaaatgacttgtaaatataccttgggaaggtaaaacaaagatgatttattgatgggaaggatggaattgatagaatgtgagggaaagggagaactcaaggggaatactctgattttttagcctgtcattggttggatggtgaagcaggcaacaaaaatgggggggcctgggcaaagattaggggggggggagccaagagtttcatttggagctcatcagtttgaaatctcagtgagacttccaaattgaataggcagttggatgcagagatgtggagcttgggcctggagatgcacattgtttggagatataaatggtgtttatagacctatggttttataatacatcccttggagagatagagagaaaccagagccaaagaccgaacccagggtcactccaccacttggaggctgggccagtggctggaatgcacagcagcacggggcctggtgtatagtaggtgttcaacaaatctttgttgctgaggaaatcagcaccagcagtagtgactgcttatgcagtttctggagcagcttgcttctgaagtcagattcatggatatcacaagctcgaagacaaacgaacagagatgttttgctcactttagttaatagatttgatcaattaaacctgtttttggaagtga

SEQ ID NO: 730 - DNA, 13817 bp, Homo sapiens
acagtagctcacacctgtaatcccagcactttggaaggccgaggtgggcggatcacctgagctcaggagtttgagaccagcctgtctctactaacaatataaaaattagctgggagtcacggtgggcgcctgtaatcccagctactcgggaggctgaggcaggagaattgcttgaacccaggagacagaggttgtagtgagctgagatcgcaccactgcactctagccttggcaacagtgcaagactgtctcaaaaacagcaacagagagcaggacgtgagacttctacctgctcactcagaatcatttctgcaccaaccatggccacgtttgtggagctcagtaccaaagccaagatgcccattgtgggcctgggcacttggaaggtaaatatgcaaatctttgcacacccttcttctctggaggggcgtttgggtgttttctctttctgcattcagccaggaaagcctggaggtcgggcaggggttggagaggtaagattcagccctggagccaggacttaggttgctttcttttctcagagctgattcaggctgcaaagctccaaggctggctttcccagcagtgatgagagcttctctagcaagtatcaaatttcaagcagctgttggacttaaaactgttttccagggcagtttctctctctggttctaggacacttaattgggctcaacgtttcccccaagtcttggctgtgggtttgttgtgggctgggtggttgaggagaggatgcagagcccgaagtccttggcacccctttgcagatcacggtgtgagacttgggctagcagcatccctatgacctggaaacttgctagaaatgcaaactggccaggtgtggtggcttatccctgtaatcccagcactttgggaaatccagacgggagggttgcttgagcccaggagttggagaccagcctgggcaacatggcaagaatccatttctacaaaaaataaataaattttctgggcatggtggcacgcacctgtagtcccagccacttgggaggctgaggtggagattgagtgttgagcctgaggggtcaaggctgcaatgagcagtgattgtgccactgcactccagtctgggcaacagagtgagatccaagaaagcaagaaagagagaaagagagagagagaaagaaagagagacagagagaaacaaaatgcagagtctcaggctccaacccaggctacctaatgggcatctgcactttaacaagatccctacgtggttcctgtacacattgaaatctgcaacatgctggggctgcagagagcctgggctgggagtcgtgagcaccacccggctgtgttaacgacagctggcaaaatgtggtaaggcacatccaggactcagtgaggcaggttcccgagcctctgttaggctaagtttcaagttgttccatcaccacctccctctgccttctttgccatttccatccatgatagcactaccctaactagtgatgagaagcagtctttggagttcctcttctctcctgtccctcatggctaatgtccctgctgagacttctgcctctggctctctttccttctgtgcaccctgatttttcttctcttctgtcccaagctagaggttaggaccctctgctgcagcactgggtcatcctcaggatacattcttggtgtatctggaggaacagatcacttccagcttgattcatgcagagcgtctcttgcttgaatagcaagatttgcccaaaatcagaccttcaatcctgtataaacagaataaataatcacttccagatctccagggaatctactcaccctgggtgagtttaccagacagtttcataattttggaattgaatgaaagaattatgaagggagctgtcttcaacacgtggggatgatagactaaaggattatgaacttagcagtggaggtgaagaagggtgtagcgtagcggttgggggcacagggctgcttctgggtgcctggcagcagctcgtttcttgtccaggtggtagggtagctgtgcatctctgttttgtgtactgttcaatgtttgttatctcacaattgaagaggtttaaaagaccattttgtgagagatcaagttttaagtgcttttttgcccccatcattggcttggctaggttagaacaaaatgtgataattctatttcccttcttttctttttttctttcttttcttttctttccttcccttctttctctccctctctgtcattcccctccctctctctttctttttacaggagtggaaaacaaactctattcctataaggttttctatttctcttttttttctgaaacgatcattgtataatgatggcctctactgaaccttactgtgtgtcaggtaatgtgcaaaaagcttaatattcattgcagcatctcatcaccacaaaggcctcatgaggctggtgctatttttttttccattttgcatacaaggtttacagagattgaatcacctgcttagacccacacacccagtaagtgatcgaatccagattgatggtgtaatgaccattatccagatccttatcaccatttggggaaattgtctgaaaatcccttggggttatttagagtcaagctttcatctgggtcttcagaaagttgtagtggagcggtctgcacccccacacacctgaagacatttcaggactaacctggatgaaaagggaactgacttttagctaggataggacataaggacataatcataaaataattcactttccttcttttcttttgaaaagttttgtaaagtgtgtatcctcccagagatcccctggcaaaggagaccccagtgaggccttggtttggagaaactgggccttgtggggcagcctgttgaaggtggcctggggataagagaatatgatggttgctgagagtggtgtaattccagctactcgggaggtgggagggttgcttgaacctgggagtgtgaggccagcctgggcaacacggcagggccccatctcttaaaaaaaacacatatgtgatgagcttttcttttgcctttcagtctcctcttggcaaagtgaaagaagcagtgaaggtggccattgatgcaggatatcggcacattgactgtgcctatgtctatcagaatgaacatgaagtgggggaagccatccaagagaagatccaagagaaggctgtgaagcgggaggacctgttcatcgtcagcaaggtgcaatggtgcatttggtgggaggccttcacttcaaggcaggcagaagtatctgggtcgggttggcagcaagaactctgtcagccttttctacatgtaccccttttcatctctgccttgataacatccgtgaatacaacactatccatactccaagccattattgatatttgaacatgtcgtggctgccccacctgcctgtaggttggttttcccatagtgggcttggttccatggaaccctgcactgccctgggcctccctgttccccatcagagggatctaccatctgcccagaggcaatcagaggccaagggtgcaggcgggtcttgatctgaagcctccctttcagcactgtgatctcagtgactgtgcccctgagactctcagccagggggaattttagaaaatggtaggggcatttttctattgtcacatatgaatttctttattcattctagtaaaaggtgagggatacaatgttataaaaaagaagaagatgttgggtgtgagagggctgagaatcactggatctatattatacataacttgctgaaaaaaaataacactagttctaggtacttggaaaatgcatacatctggtaggacaaatagacctcactgtgtagcagccaagtctggataaagcctttgtaaaattatcacttggggccttataggcttgataagggacctatcagataggtcagataaaggaccatctgctcccaaaggcctaagaatgcttgacatttaaaagctacacacaattcctgctctcagagagcctacagctgaggaagagactgagacaggtaaacaaatttcaaatctgtggccacatttacttcaatgatctgagacacgtatagagtactaggacagttgaaaaagtcaattgcttttaacacttaagacatgtcattgaggtgctgagccctggtgatgttccacactgtgtcgtggatcttaatcagctttgttacaaatggcttgtggtgggttagatgaggatgcaaatcaaaaagcagggacaatgagtacaatgtggcccttccttttcccagtattaatagctcattgctacactctttgcagttgtggcccactttctttgagagaccccttgtgaggaaagcctttgagaagaccctcaaggacctgaagctgagctatctggacgtctatcttattcactggccacagggattcaaggtttaagacactctctttctcagcctctagtttctgagcaggtgccagaaaatagtagctgcaccagggctgtggggtggtgtggactggggcaggaggccttgcatttcataattgggaatggcaggtggtcaggaagagaccttggagaagaaacacactggcctggaagggaggttgaggccatgtgtgctgctgaggtggccacatgcctgggttttcttgcagttatgtctgagagaagacatgatttctggcagcccagacaagttgcaactgccatatcacctttgtcttgattccacgccccagggttgccctcccaggaaatctcttgggttactcttgcataactatattccagggcataattatcttattaagcaaagtacacctgggagtggcatcttggagaaaagcccaagtatggtgatgctggaaggaagccagtagtgatccaggcacccattgcctggggctctgctcttacctgctcctgaggggtgggagagacaaatttccagctctctcccctcctgaccaactggagtgatgatggcctgccacccctaattccacgcctcttctagaggctgcaaggatagaagttggccaatatcttctccagaaaaccacagcttggatatctaatccttatccagtaatattgaaatgaaagtttgcccttggttgtatatgggatctaggtgtatgaggttaatgtccatggtgataatgaacttctggaatgtactagcagcaaatcttaaagtcaagccagtcgtttctaaaatattagtatgctacagtagatacagagattttaattaaactcacattcctaaagtatgtactccagaacttgaaaaagtggtatgcagatgtggtatttagcaagagtcaggatcctgaaaccttgttgaacagaaccaagtgtcctgatgcagattccagtaaacttttcattctgtgttcacagtctggggatgaccttttccccaaagatgataaaggtaatgccatcggtggaaaagcaacgttcttggatgcctgggaggtaggttcccagcttcctctaagtgtgctgggagagaaatcttcagttatccatgagattcgcatggatatgaatgaggccatgtgcctgatgctttctaatttcatcattgtgattttctagctcttctaatatcttcctcatcacctttggcttttgggtacatctgatactatttatatttcaaggctaatagtcttcaaataagactggaaatacaatgtaccccactttggggaatacacatgctgttctcaaaccagggcgaggcatttggaacaggaggtttgggcctgggtgtgctcatagcagctgagtaacctagggtcagttttgtaactcatgtagggctcagttttctcttcttaaaaagaagttgtataatacatactaccaatatatatcttccagtgtgtgataaagattaagatggtttacatgccaggaacattagtcataaagcccatttaaccctaggagacagggttaacatccccatttataaataatgacatttgaaacctagattgtttgatgacttgcccaggtcttgtcacaatgtgtgtggcagagctgggattagacccagactcatctgaatcacaagtccaaccaccaaagccatcagcatggtgcttggcaggcagtgaagacacatccagaaatcagggagcctgagtgctctgcttctcagatctaaccatgacctgtttcacgtcattcacattcaaaatgaatgaagggatgaacattttctctggtcattttttattatttatacccttttgcaaatgctagtagagaatgaagtggaggaataagttataaatgaacagtggcttatgactccaagagttaatcgtgttattttggtagctgtctgtgtaggtgtgcatgtagttgcgagtttgtattgtgttttacaagcaaaaatatattatgtttcaactttctgaaatgcttataattgacatgattcaatgaaatgtagctttttctgtgtattgtttgttcaaaagcattaatccacaagcacagctttttgttgtttttattgtcttagacactctcactctgtcacccaggctggagtgcagtggcacaatcttggctcactgcaacgtccctctaccaagtaaaagccattctcctgcctcagcctcctgagtcgctgggactagaggtgcatgccaccacgcctggctaatttttgtatttttagtagagatggggtttcaccatgttggccagtctggtctcgaagtcctgacctcaagggatccacctgtcttggcctcccaaagtgctcagattacaggtgtgagccaccacacctggctatttgcattacatatgataagatttttttatcttaactcttatgatgccatgaagtatggcaagtatgtcaatgtagcctgcttctcgcagtgctgttttttgaatgaatacaagaacgactgctaaataaaacatttgaaaggcatgaaaagatagcagtgatcaagatcagaggctctgatttgaaatgagcaggcttgaatatgtaagcgttggatgtttatgtagacccacaaccagttcagtagaaacctcactgaccacattgaagcagagaggaggaaaaatgtataaagaagtcaagttctaatacaggaaaactaacctgacctatgtgcacaaaaacttttaaattatctaattgccccatctgaaattttgggaaacctaatgatttcacagcttctaaattctactgcccaatttggataacatcatatatcctagtggttctcaacgtggctatgcattagaatcacctgaggagtttaaaaatcccaacgtctaggctacaactcagagaaaatctgtaagaaactctggggggtgaaatccaggcactggtaatttttttttttaatttagagagagtctctctctgttgcccaggctggagtacaatggcatcatcatagtttagtgcagcctcggactcctgggctgaagcaatcctcccaagtagctggaatcaaaggcacatgccgccacatccagctaattaaaaaaatttctttttgtagagacagggtcttgctatgttgcccaggatggtctccaacacctggcctcaagcaatcctcctgtctcagcctctggtaatatatatcagaaacatatatattattagtaggtattataagactttttttaagaagagaaagctaaggcctacaagagttaaaaaacttaccctaggttactcaaacctaggcccaaaacccctgttccaatcctcctgtcacctcccaaagtgctgagattacagtcatgagccactgcatccagccagtattttttaaagctccctggtgattccaaattgcagccaaagttgagaagggctggataaagtgttccctgaacatgtcgtgcttatccctgcctctgagctttgctcctgccttcctgtgtcatatgctcatgttttttccctcttttctgtctttttttttttttttttttttttcttttgaggcccagcttatactctacctgaaggactcccctgacaactgcgggctgtatgtatctcttctttctctgccctttctgactctgtctatgccgctgtgatgttatctgaggcagcctcagtgtcatgattgatggctccatagaagggaactctagcactttaattggactataagaatcccagaaaaagggagcacattgtatacatttacatcctgacaacttctgggcaggatctggaacatgtaatagatggctactaaatacatattgcactggaggctgctgctaacatgtatggtatctttgggcaagtttggaaaatgcccaatataggctaaaaattatacaaagattcccttccttgcgtgtccatgcagtttctgtaccaggaagcatggctggatatgcaaacagtgggtcaggcttcagtcccacacaactccatggccgggtgcccctatcagggtgtaatctgaatgcatgaccttcctgcaaaccaaagcatgcttagtgtgggagagagggactcaggacccacaagtgaggcttctccgtatgctgcagcctcttcctgactaacacagcttgcccaggtttgggtgtgcaatgcacacacacaacagcagctccctgctatcatttggattcattaaaaattaaatcatctcataagcttacaaatgttgatttttatttactttttatttttttgcattacaaaactttcatatttcccctgtgtacaggaagtttaattttttatgtgtttcttcacgtgtaaggtgagagtggcaagaacataaaatctttacctgttactcctagtttttcttgcgctggggaggggcagtagggctggaaccagtcactgatgggcacccaggccctggactaaaatttcctgtgaatgcttcggctaaccctgttacggtggatcctttagcaatttctgccccagggaggactaaggcaagccagggtccctgtagtccctctagagctgcccataaggtattcctttctatgataggccatggaggagctggtggatgaggggctggtgaaagcccttggggtctccaatttcagccacttccagatcgagaagctcttgaacaaacctggactgaaatataaaccagtgactaaccaggtaaattctattcagtttaagggtaagggtcctgccctattacttcttaaacattgcgggaggaatgttcaatgctatgccctgagtctcatctcaggggtcagtgatcaggacactttggggaggtgtgaggctgatctcacgggtgatttagcaagtatctcagtgggcaggtgtttggcctttgcttggtggactttttttgtgtgtagaactccctaggaacaatgcaaaacagagccggctttccccgtgatgaggattgtttgctgttgcaggttgagtgtcacccatacctcacacaggagaaactgatccagtactgccactccaagggcatcaccgttacggcctacagccccctgggctctccggatagaccttggtgaggcttccaagtggtgggtctttctcttgataatcttaaaaacattattttataattggtaaatgttggtatgggtccataagttactggaaagaaaaatgtgtgtaaggtaacacgtttggtacacacaaatgggatggcagtgggaaaaaatgggaattaaacaacaacaacaacaccaagggcgacatgcttgaccctctgggaatatttccagttcagccacccaagggtgaaccaggctttgcaaaatgctgaggcttcagagcccggggaaaggacccaagcttccaggtcctcctgcctgtctcccagatggagaggctctgatgatcagtcttgagaccctcattggagtggtgtccttctgtacatggtagccatggtgattattcacatcagcatctttctgcccctagggccaagccagaagacccttccctgctggaggatcccaagattaaggagattgctgcaaagcacaaaaaaaccgcagcccaggtgccatatttttatttttcttgttatccaacaactcattcttccagtctcgtgtttcatatcctgtgttgtcctcaacaaactccttaaaggggaagaatataggagctgaagccctctaaagtgtttcctttgaagtctgttggaacctctaggaaacacaagagctgtcactgaagcaaagatagcttctgtctcacagcttcctgtcaagccctacagcccagtggcaaagcatggctttggagtctagggatatgggtgcagatgccaactctacctctgatcagccttatgacccccaagctactttcttcattcctaaaaaaggaagatcacagggttgtctctaaggtgaagggagagaaagaggtgggggtctggcacaagtctaatagctgtgaagggctcagtaattattagcgattgtacctgaagccacagtgagctgcagagatgttttattcttcctttccataaaaggaggggtctttggagctgagtggaagcctgatgtcccctttccgcataggttctgatccgtttccatatccagaggaatgtgattgtcatccccaagtctgtgacaccagcacgcattgttgagaacattcaggtaagtttccggctggtcggccctggtattcctcagtggagtgggggacaggcagaccttctcactaggcttctcacctcatcgctgcattgtcttttgccccctcccttcccaccaccctatcattttccagcccagggagctagggtcagtagagctgagatgaatgacccatgggctaaggacatcctgggggcagtgcctggtaaagccctatcaggtctgagcacagttgtgcctcacaccactgagaagaccctcagttgcccctgagcagctaggccctgggccacacacaagaacagactgtcctggcctccctgctcacttcccggcagcagaggaggtgtgaactgtccttggagaagtgtcctctagaagcacctgtcatggagcacagggcctgtgcacgcctggggtttagtgcctgtgagcctggtctccctccccccagaacactgagcactacaaatactgtggtctttgtgtaggacctaatttagagaaaaatttgtatcccgtggacagaatgggaaaaactcctgtggccagtttgtgctgtgaatgtgagctccctccctgctagaatggccggcagtctccagccacagctagaatggccttactgatgatgtattggaactcctacctttccaggtctttgactttaaattgagtgatgaggagatggcaaccatactcagcttcaacagaaactggagggcctgtaacgtgttgcagtaagtggcatggagttaactagaagcattgccaggagtttttctaaactaatagagggttagttggaaggattggaaggctgctgggactacttgtgtcttcaaatactattttggggcaattttgaaagttaaaattggggtacctgggaatcactgtgagggacacatctctaattgctgctcattgtctgaacttctggatgtagagctagaatcataacagaaggtgggttgtcaataggcgggaggcagaacattcatttattcattcattcaatcaatatctcacggtcatctatgtgccaggcattttctaggtgcttaggttatcatactgtacaaagttgctgcctccataggcttagggagggagggaagaagagacaacagaaataaatcaactcaaaatatagatgtcagacagcaacaaatgctagacagaaaaataaagtagggcaaagtggataggaagcggtgggtggtagtgggactgatcctttatacagggtgtgtaaagggaggctttgctgtgagggatataccatatgcatatttgggggaagagcattcttggcggtgataacagcaggtgcaaagtccctgaggtgggattgtgtttagaacattcaagcaagaaggccagggaggctggattaaatcatctccaaatgcctcttaaaggaggtggtgctaactttacttaaaatcttagataagtggtgaaaaaaagctttcactctggctgggcaggcattctaaatcatctctttacaagcaatactttctgaataatgtatctaattaaatgtatcaaaaagagttgtctggcatttattactgccagatctgtaattcaatgaggatttgaatctctttcaatgtttctatagccaaaaacgatttttcaccttttaaaaatgatttcggctgggcgtggtggcccacggctgtgatcccagcactttgggaggccaaggtgggctgatcaagaggtcaggagatcaagaccatcctggctaacatggtgaaaccccgtctctaccaaaaattagctgggcgtggtggtgggcacctgtagtcccagctaattaggaggctgaggcaggagaatggtgtgaacccgggaggtagagcttgcagtgagctgagattgcgccactgcactccatcctgggtgacagcgcgagactctgtctcagaaaaaaaaaaaaggtttcagtatctcaagcgctgcttgcatgtcatgatattccatatctatcctgcccaccctaagtatcataggagcctttcctcatcttacaatggcttacttttattggagcttaacaaagtagtagctacttagagcaaaaaggaagggtgaacgtaaagtgggactcaccccccaaactaaactgcttaccttcctatgagcatcatttctggcaatgggtagcaatggaggcaatgggttggtgggctctgcagtaaatccacctggcctcaaatccaactttaacactggtttattagctgtgtgacattgggcaaatttcctagtttttccaagttggtttcttcacttataaagtaggatgataatactaatcgcagctaacatccattgaaccttagcttagaatgtgccagggtcctgcgcccttttccggtggtattatctcatttaatactcagaacaatccccaagctgtcaattctgctgttgtttcctacttcatgatgttgtgagagtggattgggacaagacttgtctgtcacctcgcctgacaccaggcttactatgggttgtcattacgagtttattctgctgccctgctcactgtctgccctccttccgagcaaagccctcatatcgatttgagggaaggtcaaagtgtgggcaccctccttatgttcttgcagggaggaggctaagagagcacaaatatgatagagtccaccagggaagaataccttctcaaccagagttgttgttttgatggaactcagtttctctgtttttgttttttgttctttcctgcagatcctctcatttggaagactatcccttcaatgcagaatattgaggttgaatctcctggtgagattatacaggagattctctttcttcgctgaagtgtgactacctccactcatgtcccattttagccaagcttatttaagatcacagtgaacttagtcctgttatagacgagaatcgaggtgctgttttagacatttatttctgtatgttcaactaggatcagaatatcacagaaaagcatggcttgaataaggaaatgacaattttttccacttatctgatcagaacaaatgtttattaagcatcagaaactctgccaacactgaggatgtaaagatcaataaaaaaaataataatcataa

SEQ ID NO: 731 - DNA, 8798 bp, Homo sapiens
ccctgggccttcccccaggaagagccccacggccagctccttcctgttcccctggcggcccctcgcttcttccttctggatgggggcccagggggcccaggagagtataaaggcgatgtggagggtgcccggcacaaccagacgcccagtcacaggcgaggtaaggtgcttggctccatgggtggggcccggcaaggtcacactggcccttgctttggagtcaggaggcctctcttcttcccacagagccctgggatgcaccggccagaggccatgctgctgctgctcacgcttgccctcctggggggccccacctgggcagggagtaagtcagtggggtctgccctcaatctcccctgcctccctccaggagagccagggactcacccggcccttgtcccagactaactctggtcacagaaccatcctgtctgcctggaggggtggggtcccctgttctggcagaggtcacccccatatcaccgcatggggattttcttccctttgggtctctcttttcttcagagatgtatggccctggaggaggcaagtatttcagcaccactgaagactacgaccatgaaatcacagggctgcgggtgtctgtaggtcttctcctggtgaaaaggtgagtagggctatggtcatgggcccagcgccatgtcccctcccatcccacagtttcaggaactcagggcagggggtaagcacccgtggccacttttgccacacatgcctggctactgtcgatgcttcctggctcccgctgatgcttcctggctggagcggagacggtcagaccgtcctccctaccttctcccttcaacccaagctcaactcaaccaaaaatggcccctctgtccccatgcctgataggaaagtcaggggaaagtctgtccgattactgtcaaagaagacaggaggtaagggtcagagtggaccactgactgaatatgagtcgcagaagtgttagaggcagaagtccagggccatttccttaatatcgaagtgtctctgctggaggtctgggatggatttttgccctgcatttagaagttctggggtcctgggagaggggagagaagcccaatagcagaggagacagagtgtgggcggggcgagccggaggggtgcatcctgggagagcaccagggtgagggaggggtgaagatgagccccgtcagggaagcgctggcgagtgtgggaagtcacctgcccctcggcctgtgagctgctctgcttggagtgactaaggctcgggaggtccaggctcggccagaggcagctcatatgtgggccacagtgacggcagctggtgccttctgggtcacggagacctggcgctgcacgcagctctcctcaccaggatctcagtgactcctcccaaaagtcacacccactttgcagacggggaaactgagtccggagaggctgggtaacgagctcaagatcacagggcccaaaagtggtagaatcagggttggtgaccagtgagtctgtgtcagggacccaaagtctgatggtgctggactctctgcatcccgggaaggaggatgggggcgctgaggacccgggatgtgctgggccatcccagatctggacgtccaaagctttgcctctctcccagtgtccaggtgaaacttggagactcctgggacgtgaaactgggagccttaggtgggaatacccaggaagtcaccctgcagccaggcgaatacatcacaaaagtctttgtcgccttccaagctttcctccggggtatggtcatgtacaccagcaaggaccgctatttctattttgggaagcttgatggccagatctcctctgcctaccccagccaagaggggcaggtgctggtgggcatctatggccagtatcaactccttggcatcaagagcattggctttgaatggaattatccactagaggagccgaccactgagccaccagttaatctcacatactcagcaaactcacccgtgggtcgctagggtggggtatggggccatccgagctgaggccatctgggtggtggtggctgatggtactggagtaactgagtcgggacgctgaatctgaatccaccaataaataaaggttctgcagaatcagtgcatccaggattggtccttggatctggggtacaaccaaagccttccctgctccttggagacaaagtccccagtgctgcagcccagtgaactgagatgaggggtagggcaaaggtgactctgccgaggacagaaagagagcagcaccaccccctcagaggtgctgtggatctctgtgccagtcccacaatctttgaagagtcaggcttcaaggccgccactccccactgtccctcaccccaggcccacccagcgggcctctgctggccactcagtcccgggattctctgagtgctcaaggggcctcagggaagccactcactcatccattcactcagcaaacatttgccaaggccgtgtcctcaccaggctcgcctggcactgggggtataaagaagaggccaggtttcagctgagtgcgtatacactgtggtgggggctggtgcagaggcagatagtggcagttcactttgccatctgcatggatggggacacatgcaggtcattgtgcgtaggcacctgcccagaggtgaggtgagagggatgtgcttcagggaagtcttcctagaggaggcaatgtctgagctaagtcttaaaggatgaaggacaattggccaagtggagacaaagggaggaggggattacaggttgagggctcaacatgagcaaagacaggagatgcagatggctggggtaatttgtcacagtagcaacaggaaatcagtacaagccctggacctggcccattcttcatgtccccttcccaagcctccaagcccacatgggcacttgccaagatcagagctccaggggcctccagggacggggttttcagtcctttgggaccatgatccacagagagaaattgatcctacttgagacacaggaagcaacacatgtaatgcaacagccaagcacccaacgatcatctaatgcaacagccaaacacccagcgatcatctaatgcaacagccaaacacccagtgatcatctaatgcaacagccaaacacccagcgatcatctaatgcaacagccaaacacccagcgatcatctaatgcaacagccaaacacccagtgatcatctaatgcaacagccaaacacccagtgatcatctaatgcaacagccaaacagacaagtgatcatctaatgcaacagccaaacagacaagtgatcatctaatgcaacagccaaacacccagtgatcatctaatgcaacagccaaacagacaagtgatcatctaatgcaacagccaaacagacaagtgatcatctaatgcaacagccaaacacccagtgatcatctaatgcaacagccaaacacccagtgatcatctaatgcaacagccaaacagacaagtgattatctaaggcaacagccaaacacccagcgatcatctaatgcaacagccaaacacccagcgatcatctaatgcaacagccaaacacccagcgatcatctaatgcaacagccaaacacccagcgatcatctaatgcaacagccaaacacccagcgatcatctaatgcaacagccaaacacccagcgatcatctaatgcaacagccaaacgcccagtgatcatctaatgcaacagccagtcagtgatcacgggaagggccaggtcctatttcaggggctccacccaaagtccccacccacaacaattgaaggacaggacttcaattatcctcatttgcaaaatgaggaaacagaggaactgagagcaaagtgacttgtcccacgcagccgttagaggtagagttggaggtccaccttgaggtgaccaagctgcaaagtctggccactgaacaccagacctaggcaaagatttcccaacccagtttcatctttctgcatgaaatacacacagacgttttttctcttctctacttttatttttatttaattttaaatgctggttgagagccacttcttaacctggggtctgtggacaaaaatcagaaatcaaaattcagagaatccatgaactgggatggggggggggaaattacctcttttttttttattgcccttgactgaaaatttcatgtttccttcgggtatgaatgtgacctcacatgcaacacccatgaaatgaccacatcaaatactgttgtcacagacaccttgaaatttacagccgtcaccacttcaaaattatggtgatcagacttgccattcaacgtgttgataatccaagcccaggcacagaacacatttaagaaaacattttggcccgggcacagtggctcacgcctgtaatcccagtactttgggaggccaagccggtcagttcatgaggtcagtagttccaggcccagcctggccaccatggtgaaacccagtctctactaaaaatccaaaaattatccgggcatggtggcgtgcgcctataatcccagatactcaggagtctgaggcagcagaatcgcttgaacatgagacgtggagggttccagtgagccaagattgcactactgctctccagcctgggtgacagagtaagactctgtctaaagagagaaagaaagaaaagaaaagaaaatagaaaagagctgagtcccaagcactgctggtggaatccagtttctgctgaatgtgttttgagtatgtgtgccaatattactagagtgctagtaagtctcctgtgatttggatcgtctgtgttctgggatgagtggatggatggatggatggatggatggatggatgggtgggtgggtgggtgggtggatgaatggatggatggatgggttgatgggtgggtggatggatgggtggatgaatggatgggtgagtcagtaaatggatggataggtcggtagatgggtaggtgggtgggtgaatgggtggaataatggatggataggtggatggctggatggatgggtgggtgaatgggtaggtgggtaggtgggtgggtgagtgggtagatgcatgaatggatggatgaatttatgagtcagtagatgggtgggcgggtggatggatgtacaaatgggtgagtggatggatggataagtgggtgggtgggtgaggggatagatggacagaaaacacactagcgggaccaggcacagtggcttacacctgtaatcccagcactttgggaggtcgagacggatgatcacttgagcccaggagttcaagaccagccaaagcaacacagcgagaccctgcctctacaatctacaaaaatacataaccaggcgtggtggcgtgggcctgtagtcccagctacttgggaggttaaaacaggagaatcacttgagcccaggaggtagagactgcagtgagctgaggtcgcgccattgcactccagcctaagaaacaggagtgaaaccttgtctcagaaaaagaaaaaagaaaaagaaagaaaggaaaagaaaaaaaagaaaaggaaaggaaagaaaagacactagcattcatcacgatccaattttggaccaggcgcaatggtgagtgcttacacaaggactgcctcatttaatcatcacaaacacccttgcggtgggtgttaatctcacatttttaaagacaaggaagcccaggctgagcgagtgagtcatggaattccaaccgcaatcccacagtcctcctgccacttcctgctcaggtgttggcccagtcccaccattgtcgggggaggttctttcctgagagtccctgcgtcccaagtgcccaaatacttcagccaccacaacatgtgattttcttgtcctggaattctgaggtccacatgcatacagtgccgctggcagagcctgctgtaatcctgagaattccttttcatcgactcactgcaagttcagagacaaggcatcgactcactacaagttcagagacaaggtgcgtgccagacctgcaccctgggctccagggtgaggaaggaaccgctcgtcctacgctgggtccctgcctctgctcctgcttgtcacccttggccaaacgttccccaatcccgagcggctctggcctttggacagaagtcagcctgtcagccttctggaacacctgcgtccattgtggccacttcctcatccccagaccggctcagtcttgcaggggcgtttgaattgtttcctcctacacaacactgaactgtgcagctcccgccccgacctgtctctaaacagtgtcactagtcccaaggcctcctgcaggccactgggcccacagacaggccaaccagcaaactgggggtcccactgagagacacctggtgctggttgccgtgcacttagagtgggccaggcagctggaacctaagaggagctgctggaggaagtggagcaccttgaatgtcacctggactcacgtctgcccctaccgccccctcggacccgcacccaccccccggcccaggcaccaggtgaaccctctgtgtctttccaacaagccccaggcaggaggggcttcacaagcagaagcaccagtcttgtaagtcctctacaaacagcacctgtgtgaggggccagagaaagagaagacaaagagggctgtgtgcgcaccacagtccaggtcaggcgcggaaaatccttctgtagcttttgctgttggctgaggccccttccttctaactcaccgttggcagaagtcggatgcctcggagagaaaagaggctcagcaggcttcccctgcccgtgggggtcaaggagcgttcgtgctgtccactgccaggaaatgtggggggttctgaggaccacacagacacacacacacacaaatacacacccattcaaacatacacacaaaatacacatgcagacacacacgcacacaaatacacacccatatacacatacacacaaatacacacccacccagagacacacacaaatacacacccatacacacatacacagacaagcacatacacaaatacctacacacacacaaaaatacccacccacacagagacacacaaatacacacccactgacacacacacacaaatacacacccatccacacagagacacacacacaaatacccattcacatacacgcaaatacacacccacccccacacaaatacacacccatccacagagacacgcacacacacatacccatacatacatacacacacaaatacacacccacctccccacacacccagacacacacacacacccacacacccattcacatgcacgcaaatatacacccagccccccatgcaaatacccacacagagacacagacacacagaaatacacacccacccagagacacactcacaaacacacaccacagaaacacacacacacatacatacatgcaaatacacacccatacacagacacacaaatacccacagacacacacacccacacacacagacacatacacatacacacacctaccccacagagacacatacagagacgcagacacatacacaaatacacaaacacgtatgtacacacacacacacatgcacataaaagtacacccacacccatccacacacaggcacacacaaacacacataaatacacacccacacacagacacatccacacacagacaggcacacagcctggacaggggcctcctggatgggagtggatcctggcacagggctgatggcacagcagccctggtcaaggtcatctggggaagagactggggggggtccttgggcacggtggctcacgcctgtcatcccagcactttgggaggctggggcaggcggatcacttgaggtcagaagttcaagaccagcctgggcaacatggtgaaaccctgtctctactaaaaatacaaaaattagccgagcatggtggtgtgcacatgtactcccaggtaggctgaggtgggaggatcgcttaagcccaggaggtcgaggctgcaatgagctgagattgagccactgcactccagcctgggcaatagagcaagaccctgtcacaaaagaaaaaaggagagagaaactgaaggggctgatatgcaaggagggaggctgagtgcttctgagacatccttggtgcttcaggcctatgtgacggagggctgccaactctaacattaaagcagaaatccagaagtgaggattttgttttaatccttcactttccctcctcactagatttctggaaggagttatttatgagtgaagagctggagaatccattcgcaaactgatgcatgaaagtgattagcaagagaaagttgtgagacaaaacagagaagctgagaggccagaaacctctacccaggacgctgagctcctggcggatccgatgagtccctccaggacaccgtccaccctgggatgaaggcagaggagttggaaggaggcgaggccgtcacgggacaacaggaccctatgaaggtgggcccacagcaaaaggagagatgattctagagcatccagtcttctagggcagcaaaacaacctaaattttctaagaggccacccagctgagggtgcccccggggagggctgaggcgtcagggtgacggctccactgcccactcacctgcgacctcaaagcccctctcctccttggggtgctcctgacagccacctccagggcaggcgagtggcgctgggacaaaggctggcccgactgcgccccacccaagcagacggtccttcccccagacctggcgccaaactggagtgaaagcccgaccaccgtgtctcacagggaaactgacaccagatgcgaacttc

SEQ ID NO: 732 - DNA, 4101 bp, Homo sapiens
aactcagcgccaacccgcagaaccaggaaagtaacggctacagacagtgagaaatagtttcgctcgccggctagaaaaactctgtcggtaccaaccccagagcgttgagagcagcccacctccacgcttccttaacggagaggtgcaggactcagacttcaccagcccactcggtcccagccttgtacgcaaagagacgccaaggacgcgctctcccgcgtccaggcagccccagcttgctggcttgcctgcccgcctgcgtgcagcactcggccggcgtgcagcatgaccctgtggaacggcgtactgcctttttacccccagccccggcatgccgcaggcttcagcgttccactgctcatcgttattctagtgtttttggctctagcagcaagcttcctgctcatcttgccggggatccgtggccactcggtaagggtgtcctcatagtgcaggtagagtgggggaaggctcatgggcagattgtctcctgagggacccaggacaggtaagactgtacaagagcctccatgaatagtcgaattgaggctcaggtggagtgaagtcaggagtctggtgcagcaagcacccctttccaaggatagggagagctccccatccaggatatcctggagaaggaccccagctgggtccttgggaaggctgctgcagagaatgggcacccagtccagtaatcctgaggaacagtctaggcttcttgtgctggagggcctcccacctctcccaggactaaagctgcactctcatcccatccggtgggtgatgaccttcaggccaaaaggacagatgccagcagctcagactgcagtgttcccctttgcactgggttgagacacatgtgtatgggtgcctcatcctcaggactgagactcccacattggattagaagttggagccaactgggtgcattgtcttagactttccccctctcccagaacctaggttgtgcatttttcagttctgggaggacccagcttttctgcatcttaatctgtgttgctttccctggaactggtgcacctaggagtatctgcattcccacctcctcccctcggagatcaggctggggcctccctcttctgagggaggtgacccctgcgtgcctagcacttctggactcactgagcctcaccaagcagtgactggaccaggaggcagaaccaggaccaggcgccagacagctaggggagtgaaggtggtggaagagtgccaggaagtgggggtggaggggaggtgctgttagggtagatgggaaatggggctagggaggtgaaagtgcgtggtcacaaaatatcagaaatgccagtagcccagagggacttgcaggaaaagcgtgcctaacattagtctcaaaagtctggatataactaaagatccaggtgaagtggggtcaagggtggtcttggggactctggtttggcagggctcaggcctgacccgggtgcctattcctgcagcgctggttttggttggtgagagttcttctcagtctgttcataggcgcagaaattgtgggtgagtgtgtggtgcagcccatggggagaggacggggtgaggaaggaggtgggcagagggcacctgggacaatagggaactggggttggttttctgctccctcttcccactctccagctccttctagggcccactttttggcccttaccatgcaaccacattggacctctaagtccccatctctctgcagtgtcccacctcccataccactctctaattccattttcccaccctcatcccacccccaccgtgtgcctttccctacagctgtgcacttcagtgcagaatggttcgtgggtacagtgaacaccaacacatcctacaaagccttcagcgcagcgcgcgttacagcccgtgtccgtctgctcgtgggcctggagggcattaatattacactcacaggtgagggggctggggctaaatgaactcctggagctgggagatccccggttaggtgagtgtgtcagggatagctggagggcctctcacatcccacaagctcaaatagcttgtggtcctcgtggatttgcgttttctccaaccaccaccgaacccatttctcccgccgagagcgccacacccccactttcctgtctgaatccgcttagttgcgaggtctccgaccgcgggcagccccatgagcccgcctcaccccacagggaccccagtgcatcagctgaacgagaccattgactacaacgagcagttcacctggcgtctgaaagagaattacgccgcggagtacgcgaacgcactggagaaggggctgccggacccagtgctctacctggcggagaagttcacaccgagtagcccttgcggcctgtaccaccagtaccacctggcgggacactacgcctcggccacgctatggtaagtgctggagggaaggctgtgtgcacgtgtgtgtgtgccaggagctgggccgtatgagcgggaggatgcaggcctcggaggcgctgagcagctgcagccagacccgacgcgctcggggtgggcatgacagcctcgcgggttagaagatccacgagatctgcacagacggaatccggagagactccagccaccgcctggacctcaggagcccgcttctcccccggggaattcccctgcaccgctgccatcccagtccctggctttgacgctggggtagggataaagaagagcgcagctgtgggaaccccggtgggctgggagaagcccgctcacagcgggtccccccactccccggcagggtggcgttctgcttctggctcctctccaacgtgctgctctccacgccggccccgctctacggaggcctggcactgctgaccaccggagccttcgcgctcttcggggtcttcgccttggcctccatctctagcgtgccgctctgcccgctccgcctaggctcctccgcgctcaccactcagtacggcgccgccttctgggtcacgctggcaaccggtgaggaccgagagaatgggccccgggggctaagggtggagacaggattcacaccgggtgtgcactttccagtttacagaatgaattcacatctattaccctatttgcccctctcaatagttcgcagaaacaggcactgttatgaccattttacagatgaaaagtggggggctcagaagggtttggtgtcttgccgtgtttcatgtaattcagattagaggtgtgtggcgggaggtaacacaaggggtaggctccaaaagatggaagaaggcccgggcatcacgcctgtaatcccagcactttgggaggtcgaggcaggaaggtcgtttgaggccagagttcgagaccagcctgggcaacatagccctgactccacatgccctcctttctttcgatccccaccgccacaggcgtcctgtgcctcttcctcggaggggccgtggtgagtctccagtatgttcggcccagcgctcttcgcacccttctggaccaaagcgccaaggactgcagccaggagagagggggctcacctcttatcctcggcgacccactgcacaagcaggccgctctcccagacttaaaatgtatcaccactaacctgtgagggggacccaatctggactccttccccgccttgggacatcgcaggccgggaagcagtgcccgccaggcctgggccaggagagctccaggaagggcactgagcgctgctggcgcgaggcctcggacatccgcaggcaccagggaaagtctcctggggcgatctgtaaataaacctttttttcttttgttttttaaaaactgtttttcccattaattttcatggcttctccgcgccggggtcgcacgtcctcatgagcttcgctgggctggagacagcctagtacactctccgcagtgctgtgaaacctgattctctgcgtcgactccagagtaataggggcgccctctagtgaggccggagggaccctaccagagctagcatctttctgaaccaccccagggggacgttaggtggcagtgatgaggcaggtcacccactcccccgtcctggatgccactcagctagcccagctgagtggggtgggaaggaatagcgttttggagttgattccc

SEQ ID NO: 733 - DNA, 10886 bp, Homo sapiens
attctcccggcctcagacacacacaccagcagctacacctacacgctgaccatcacaggcacacagaggcacatccacctcacatccacctcatacttgtgtactctcagggttcagtctttcatcctatccctctctgatctgtgcctcccaataccttccaagatgtttacagagacccttctccctgtgcagttaggagtgtaaggcaagagagcccctacttcatggggcagatcaagagctgagaccaaagatggtctatgttgctgaccttgtcctgtcctcctgctgtcttaaactatgatccctgctgcggtcactgaagcctttccctgtaagtattcagccataaccctcccctcacgccctgcatagtcagctggttaacacctctgtgtggaataaggcagtttgagcagaatgactgtatttgttgttcaccacccacacggcccctaggagatgcaggtccagggcaaaccaagcttctgggctagcttctgggcacttctagaggatcagaaaaatcccaggttgcctgagatgtctgagaactgaggagaggaaggagagggaagagtttgaggaaggaagcagttctggaagttccctgcctcttggattcagcccctccccaaaccctctgcttccagccaatccatcctccattaaggctgtcagcactttggggtgcctgccatcaggagtcccccatatatgtaggggtgctatttcacagagatcatcctttggcgtgcctaaacagaaccaggtagggaaatcttcactggctctggtttttttttttttttcttgagacagagtctagctctgtcacccaggctggagtgcagtggcgcgatcttggctcactgcaacctctgcctcccgggttcaagcaattctcctgcctcagcctcccaagtagctgggactaaaggcgtgtgccaccacgcccggctaatttttttttgtatttttagtagagatgggatttcaccgtgttagccaggatggtctcgatctcctgaccttgtgatctgcccgccttggcctcccaaagtgccgggattacaggcatgagccaccgcacccagcctagtggctctgttttttaaaaccccaccctggctcacaggccccctggctaaccttgaggtgggaagatccacactatggtggtgtcagtgtgggtgttgttgatacccatggccctggtggcaggattgatggctgcactgctggcagttcgacctcggagaccctgttgatatcttctgcggctacacttgaacatcctgggaaatcggggcctgggccagcccatacctggcctgcggtagggggaacgcatgccctggggccgagggccacggacaagccgagatggccccatgggcacagggagcttctgcagtgtgcctggggggtgctgttggccagggtagctgaggcctctatgacatacaaagtctgcataagggcagggccctttattacaagtcgtgggccctggcccctcctcatgggtcaggctccttcacaatcttctttattgggtctggcctaaaagccagcccaagagccagacagcctcagtttggccccttgggaaaagaggccctagaggcggaactcacttcctcactttctcacttatccatatagtaacaatattaacaatgttttttgagcacttactacgtgccagacactgtgctgagcactttaccaacgttatctcatttaatctcagctactttacaaggatatgccatcattatacctatttatatacagtcaattctcattattcccagtaatgttctataaagtcgccacaaacactaaatactgaacaaagggtaaatgcaaggttaggttcctgaaaccctctggtcacaatatttttgtcaactgatctatacatataacctgattttatgtgtggagacaccttatttaatatatattgttggccaggcatggtggctcaagcctgtaatcccagcactttgggaggccgaggtgggcagatcacctgaggtcaggagttcaagactagcctggttaacatggcaaaaccccatctctactaaaaatacaaaaattagctgggtgtggtggtgggtgcctgtagtcccagctactcaggaggctgagacaggagaatagcttgaacccaggaggtggagattgcagtgagcccagattgcaccattgcactccagcctgggcaacaagagtgaaactctgtctcaaaaaaaaaaaaaatatatctatctatctatctatctatctatctaactatctatctatatttgagtcattgacattgaactcacagccaacagcattataacttgtgcctgaatgaaacttatctaaagcacatatttcccctataaggcacatcacagccttcttgcacttagaaagactagagagcacttcagcactacaactggggaccattttagacagtaaaatcaccagcaaaaaacaccaaaaaatgtgagaatatgcgtcactaaatagaccaccaaaaagcacatttgtttactctatgaaaactgaaataagaagacagagagtcctcttgctcaacagacctcagctggaaatacgtgtgttggacggctgaaattttttgcctttctgctcatgtccatgaatgactgcaaaagtaccacaagtactggtttgggaattacaaataaatttcagtaagcaggcaaattcacaggtatggaatctgtgaataaggaggatccactgtataaggaaactggggctcagtgaggtgaagtcacacaattagaggcaggcaggaagcaaatccatgatgatcaagatccaaaacccagagcacttaactctcattattctgcactcattcactcaggaaatgttcactgacaacttcttatgtgccaagcaccagggccatagatgaatgtaatctggtcccaattcttcctgagaatgaaacagaaaggttccaggtgcggtggctcacgcctgtaatcccagcactttgggagcccgaggtgggtggatgacttgaggtcaggagctcgagagcagcctggtcaacatggtgaaaccctgtctctactaaaaatacaaaaattagctgggtgtggtggtgtgcacctataataccagctactcaggaggctgaggcaggagaatcgcttgaaactgggaggcggaggttgcagtgagccaagattgcgccactgcattccagcctgggcaacagagtgagattctgtcaaaaaaaaaaaaaatagaccttctccttctccttccactcctcagtcccttcttcctttcccccttactctgctcctcaaatgcccccttcccaacttcatcctcctttctgtttgtggaggactctgtggcacccttagtaccaccctcacaaacctcatctttcccccatcccctcctccagcctctactcttgccatcctcagtcttaaaatatgaccttgcttccaccaacttctagcaactgtaactataaaccgacctgcccctgctcctcctcttcctcaggtcagaccaaggcctcttcccttgctctttatggaagccagccttgtctgcctctttagagattccatcagtgtagacagtctgcttggtggttaagatgtagactctggtgccagactaactgggattgaatcctggctctgccacttacaggctttgtgatcatggcaagtacctgaccctttggtgcttctatttccccatatttaaaaatggagatcagaaagtctatctcatgggatggttgtgaagaggaaaaaaagccttaatatatgcaagacatttaaaataagatcagtattattagtgtagtctgtaatactattagcccctctctcttctgtctcttcagctgcctcctttcactataaaaacaaaacaaacttagaaatccacttcctcagctaggcacagtggctgatgcctgtaatcccatcactttgggaggctgaggcagaggattacttgagcccagttcaagaccagcctggatagcatagcaagacctcatctgtttaaaaaaaaaaaatttgcttgagtgccggcaaatacctgtggtcccagctacttgggaggctgaggatcatttgagctcaggaggtcaaggctgcagtgagctgtgatgttgccactacactccaacctgggcaacagagcaagaccctgtctcagaaaaaaaaaaaaaaaaatcaacttcctccatctcatagccccactgcctgtgactctctcgactttgaccttcttgctctgtgctcattccctactgtcccttccttctagagcaggaagaaaatctcatttgaaaagcccagaactattctgttacacagaagaccaggaaagagaagtttaaaaccaagtctaagaaaagtccccagggtcacacagttcataagcgacagagccaggattccagcacctggtctgaatgacccagaagccaggacttttcccccgcacctctacatcaggcgtgctggagcaggaagcggtcaggcagccccactaggagtaacaaagatgggatcacagagccttggaactgggggtggctccttcatgagaccatggtgccacctactggcagaaagagaaggggtgtacacagagcgctaagagaagactgggaaggagaaaaagaaaaagatggggaaggagaggagatggaaagatgaagggaggggaaaaatggggaatgtgaggtttcatggagggaagaggattaggaactatttgctactcgcaggagagagcggaagctgccaaatctcagtcatttccttgaaagtgagtgagagacagagaaagagaaagagggagtgtgtgtgtgtgtgtgtgtgtgtttgtgtgtgtgtgtgagtgaaagagatacttaagtacgtacatcagatattattctgttgtttgttagttgctgggagtcagtccacaaagaatttagtgtgcgtgtgtgcgcacggacgcacacacacacatgcattcaggaacactagcacatgtttatgtatgtaactgggtgcttgctgtatgaacatatggatggcagcatgagcagatgcatgtgcatgtgagcatgagcacagagggtatgtatgagtgtatcagcagatgcagggtaagaagcacattacactgttgtggtggagggcacgcagacattctgggaagccacttgccccacccctgggctgcttcttcttgagatcaggaggggcgttgcccagggctggtgttgccaggtggaggcctgctgaggcagtggttgtggggatcggtctccaggcagcagggggcagcagggtcaaggagaggctaactggccacgggtggggccagcaggcgggcagaaggaggctttaaagcgcctaccctgcctgcaggtgagcagtggtgtgtgagagccaggcgtccctctgcctgcccactcagtggcaacacccgggagctgttttgtcctttgtggagcctcagcagttccctctttcagaactcactgccaagagccctgaacaggtaatgggatagggatacagattatcctgtgaagtgatatcgatctggaaacaggtctggggagctggaggggctctagtgagggttctgggagggtctggggttagtgtgggggggagcacaggatatacaggtgctaggaaagagcatggagtgacctgcagtgtgggagtcaggctgggtgtgcaggtggaggaacctggggtgttaggatctcagagtgtcaggtgctggtggaggtcctgggtagtatagaggggtaagggtgttaggatagaaactgggaaaaggtctgtgtcagaccaggtacaggagaagcttggtgagatatgggttcaggatcctggggtctggcatatctggctgaatatctgaagccagggccagcccaggtgggcccaggggaaacaaggccctaacttgcacatgtctacctcccaggagccaccatgcagtgcttcagcttcattaagaccatgatgatcctcttcaatttgctcatctttgtaagtacggacattgtggactctttggggctccctataggagcaggtcacaagctgagtagagactaagctggggaatgggagactgctatgcccaggcttcgtcctgcatgtgtccccttatgagtgggatgcaaaggtctccccaaatgctgctgattcctagtcccagcagcagccaggctgccatacaggtgcgtgtgtgaaaaaggggatggagaagctaggggcaccccctctctcctacaaagctttagcctaggcttcaggcagggcagagtaagctaccaggaatgattctccaccctttataggcactgggggcccagaaaatagaagggctccacccaagtttacctaccacagaaggaaattcagtacagaggaaattcttctgtatgacggggagctgaaaggagggagggcctacctctcatcagagcaacagtccttattcattcgacaaacattcattgtctaggataccatgatgggtgctggggtggcaggtaagcaaagcctttctctgccctgaaggatctcagctccgataagccagataggcagataataacaacacagtgtgtttgggcttaggacggaggttatgggagcctgaactcagcctggttggagaatacttcctggaggaaatagctgaagctgggaaattgcacttggtgggggagttataaagcatgcataaagggccagaagtagtgaaacttgatatcgttcagaaaaccagaaacagattgcatagggcatgtttgagaagctgagccatgaggcgtaaatcctggagatggtggtggagatagggagaaacggacaaagtggacaaaggacaaagctctaggatgatggctgaggggtagaagaaggggcaagggagacagaggtcttggagatgacgcccatatctctggcatgagcaacccagatggcagggggtggggcctggtttgtgggaaggggtgtcccactagcagatgtgtacccagtggaggtgcagctcagattggagctggccatgggtatttgaaaatcatgtgcgcacaggtagccactgaagccatgggagtggatgagaacacttggaaagtgaactctgggaaacccaatttattagggataagcaaaaaaaaaaaaagccactgtgaaggagatggagaaggagcagtgggagggggagaggaaaacaaggagagtagtacactaaccacattagagtaggttagtgtaagtgaaagtgaggaagtgggccaggtgcagtagctcacaactgtaatcccagcactctgggaagctgaggcgggcagattagttgagctcaggagttcgagaccagcctggccaatatggtgaaaccccgtctctactaaaaatacaaaaattagctggatgtggtggcgcatgcctgtaatcccagctacttgggaggctgaggaaggacaatcacttgaacccaggaggcggaggttgcagtgagccaagatcacaccactgcactccagcctgggcgacagagtttatgtatgtattgattagtttagaagcgtgggtagactctctagttctgatgtggtctgtgccttgggcttccttcggctgcagggaacttgtgtttttgttgttgttgttgttgttgtttgtttctttgagacaggatcttgctttgtcaccaaagctggagtgcagtggcatgatcatggcttactgcagcgtcaacctcctgggctcaagggattcccctacctcactcagcctcctgagtatctaggactacaggagtgtgccaccatgctcagctaattaaaaaaaattttttttgtagaggcggtctcactatattgcccaggctggtctcgaactcctggacttaagtgattctcccacctctgcctcccaaagtgcggggattacaggcatgagccactgtgccagtcctgaactagtctttatccctgtatctggaggaagcaataggattccagggatttggacaggagaggctctgccctgagagggttaaaggcaaatccggtttgatttctggcctctgttacccagaccttgccaggctgggcaaagcaggatagggcagacctccagctccatgaaatttgaccctgcaggctagaagtccagctttctgtccttgggcaaacatgcctggaatccagccacaatctgccacctcacttcccgttctagcctcagtttttatagctggcaagtgaggactagtcaccaaggtggtgtcaggctgattcatccactgaagccctgggccgggaggctttcctctaagatctgtgggaactgcgcagggccctcctcaatctaggcctcagaattccccctgaggtttggagttgagctagacagcctttaagagaagctctggctgtattcccactggtacctcactttcctcttgtgaggcaaggaggtcttgtctacatgaggggcgggcctgaagttggattctggaggggagccaaatggggcctcaggtgggtgaaccttctcaacctcctccctctccaaggttgccagcaggtggaacctcagcctcgcctccattactatggtgactattgagcctgttctgctaccacccccgtctccacctatcagaggacagaggtgttctaggcacccatagcccagaaaggaaataggaggctgggccctcacctgcctgttttcaatcctagctatgtggcaggaccctggcagcagtgagggaaagtcttgcccctctgcccaccctgaggatatttctagaacccctgatctcctttatatctgcccaggtgtgcagcctggtcctagctatgcatatcccagctcccatttttctggctctagaggatgtttccctccttacaggatgaggttttagactccctagccaataaagagggaagtttctcggctcccatccttcttactcagctgtgtggtagtaagctacttgccagcactgtttaaggcctgcctgacctctctctccccagctgtgtggtgcagccctgttggcagtgggcatctgggtgtcaatcgatggggcatcctttctgaagatcttcgggccactgtcgtccagtgccatgcagtttgtcaacgtgggctacttcctcatcgcagccggcgttgtggtctttgctcttggtttcctgggctgctatggtgctaagactgagagcaagtgtgccctcgtgacggtgtgtgaaacccagctccacaggctgatgaccaagagtcccctcgcccttgacaccaggccctgggattcccaaaccctgctttggacccccctaggctcaggcttctgtctcacttttccgggggggggattagggcaaggagggcatgagggactgtctctccctaaaacccagacccctgttccccactcagttcttcttcatcctcctcctcatcttcattgctgaggttgcagctgctgtggtcgccttggtgtacaccacaatggtgagacactgggatggaggaagggaagaagattgggcaaaaccctgggagtgggctgtggcctgtgaatggccaccttctgtaccagcccctaaacactggcctgcctcacccaggctgagcacttcctgacgttgctggtagtgcctgccatcaagaaagattatggttcccaggaagacttcactcaagtgtggaacaccaccatgaaaggggtaaggttggctgggggaggttttagggtggagagaaagaagcaaggccccacctccaccctcatcttgtctccagctcaagtgctgtggcttcaccaactatacggattttgaggactcaccctacttcaaagagaacagtgcctttcccccattctgttgcaatgacaacgtcaccaacacagccaatgaaacctgcaccaagcaaaaggctcacgaccaaaaagtagaggtgtgggctggcatgagtgggtggggactgttttcatggcctcagagtggcaaacggggatgggagtagggcagctgccaactataaatgctcttttctcttcctgaagggttgcttcaatcagcttttgtatgacatccgaactaatgcagtcaccgtgggtggtgtggcagctggaattgggggcctcgaggtaagcagatgaggaggctgggactgggacatgggcatgagaccagggctgctcaacccatctgaggcctctctggaggaaacagacttctaactgggcctcaggtagggtgtctgtgggacaggcttcaggatccctatcatgttccctcatctctccctgttcctccctctccagctggctgccatgattgtgtccatgtatctgtactgcaatctacaataagtccacttctgcctctgccactactgctgccacatgggaactgtgaagaggcaccctggcaagcagcagtgattgggggaggggacaggatctaacaatgtcacttgggccagaatggacctgccctttctgctccagacttggggctagatagggaccactccttttaggcgatgcctgactttccttccattggtgggtggatgggtggggggcattccagagcctctaaggtagccagttctgttgcccattcccccagtctattaaacccttgatatgccccctaggcctagtggtgatcccagtgctctactgggggatgagagaaaggcattttatagcctgggcataagtgaaatcagcagagcctctgggtggatgtgtagaaggcacttcaaaatgcataaacctgttacaatgtt

SEQ ID NO: 734 - DNA, 32152 bp, Homo sapiens
accccctctccctgcacctttctttatcttggagcctctcccatctctccctccctcttcctccctaccccaccctccgaccaccccacttcttcccctcccctcacacttccctccctcccttctctcgtctcctccccactgcgcctccctccctcctggccttccttcccttccccgactttgcagatttctcttcccccaggcctccctcctccacctctccgccccctccgggcttggctctcccaggaggctacgactggagccactggtcccgcaggatccccgcgtcctcggtcgccgcgtccacgtccctctcgcgtccccgcccggcgccacgccgcctcctctgggttcggcctccgcgcggtgcagcgcagtctcaggccgcgggacaaggtacgtgcgcgtccccggggcacacaagcccacacaagcccgggccccgctcctctgaactcccgcgtgtgttctgactatggcaaagaaggtctttgccgcgtgcacgggtaaggaacttcccatagtccgttttcagaagctgactttcataaaagtgatacgttgtccttgcagaacagcagcctccacgatcccatgcgtccgaagcagccgctgtttacattttggtattttcctgtaggtgtttcgccatgcattttaaagacatagtggaaatcacaccgtatgcaaacttgcgttcgttttggccatttagcacggaggagcctttccaccatgccgttaaatactccttgtaactctcttcctgcagtgagacattctggttgtagcgtttttactaatataaaactattaaaaaactgagcatatttgcaactaaatcagcatccacattcgacagcttttctttagggtgggtattaagaagagaggtgctgggtctatggatctaagagtgggacatcctaaatgctgggtaggtgtgccaggaacgactggacagtttacaccccacagccatgtgggtcgggcaggccttggaaacactgggcactgagatttatgtccacttgctgatggaagatgccacctgttgttttcaaagcccatttaaaataaagtggttagtaatgagcctcgccggtatccggggaatcctgtccaggcctgggaaccctatccaggcctaggaacagccagagaaaaagcagattctgcaggggcgtcgttggcatgtctaagagggccattgtgggctcatccaggtagcttcctaattcatgctatctcgaccatagacacttggaaaatacaagcatggctgctgaaaaataaatatttggagaagtttgatgtttgtagaatcatctaaggataagtactggccctgccttccctgctgcaagattgaaaatcacttgccatgcaagttcctacaatgtttaagcagtaaaggagaaacctcctgcctttcccattagaccccactttcctgtgttgtcttggggtcctctgtaaccctgagccctggatgcacttccacgtggtttctatttctaaatttctaaagcttccagaaatgtattcctcccttctctcctctcctccccgctgcgcctccctccctcctggccttcccttcccctactttgcagacctctcttcccccagacctccctcctcctcctctctgccccctccgggctcaggctctcccaggaggctggagatgtattcctagacttccctgcttgttataatcccaactgcaccagtcccttttgcttgtcaaaatctgttttctctatttctgttggagaactgcgttgtgcctggaagtctgacttgtgagttatttgaatccttagggcgtgaaatcaggaaaaccacaccctcaccatactttatcacctctcttacctgtctgactgccagtgttagaaagggaatgtttgattacattgttaaaagataattttcagccaaaggtgaaatcgtgacttttatacagatataaaagtgataaatattttattttattcattaaagagagaaataggcagatgttgtaactggttcaaaaaagaagtcaagaagtgcaaatgtatacggagtaaaggagtgccttgtgaaggtacacgcaggagaggagcatacccttggaatttgcagatcaaacactcaactgtaagattgggcacagtggctcatgcctgtaatcctagcactttgggaggccgaggtggatgtatcctgaagtcaggagtttgagaccagcctggccaacatggtgaaacccagtctctactaaaatacaaaaattagccaggcgtggtggcatgtgcctataatcccagctactcaggaggctgtggcaggaatatcgtttgaaccagtggggcagaggttgcagtgagcggagattgcaccattgcactccagcctgggcaacagagtgagactccgtctcaaaaaaaacaaaaaacaaaaaacaaaaaacactcaacagtgatccccatgggttttgatgtgtaattttccagagggacatgcttgtgttaggcagagtgaggctccttcacccctacagagtgactcctgtggcccctccagctctgcctcacacaagcaaatctctctggaaaattacacatcaaaacccatggggatcactgttgagtatttgatctgcaaattccaattccatatgctcctctcctgtgcataccatcacatagaagtcattcacacatatgcagcaccttgcagcaatgtctatggggaatcatgcatttgtgctggtggtggccagtgtgggcattgccgacgaacatggccaccagggtgtcctgcagggcactccacagagctaggaaaagcgtcctgatttccagagacgtcaccagtggagaccacagaactgacctggggatgaccagaaggtggccccaaacacatctgccatgatacagaaaagcctttattgacagcatgtgtaacgaggactctgtcatgcatctcagacacacagtcctgccccagcacaggaggaaaaggaaaccttcttactcacaataaaggacctcatcatttgtaaaaagtgcctcagtggaaaagtacccatgtctatagcacgccctgtgggctgtctgattccagctccattcattgtacttgagccatttttaggagtaagtggcagatctgatagatctgtaaattctatcccgtttccatgcagaattaatggactctttcccctcctgtggaaaaaagttaaaaaaaaaacatgttgtctaggctggtctctaactcccagcctcaagcaatcctcttgcctcagcttcccaaagtgctgggattacaggtgtgagccactgcgtttggccaaaaagatattttgtcttcatttgcaattcatctcaacatttcttttgtcaactaaagaatgatgagtttcataaatttggaaaaagagagctttatttctcataaagtgttgcagcccgcaaagcggccattctgacaggctgggaagtgtagtctctggccagaagctggaaacagacccttccagtgtgggaagaatagtacagggatctgtgctgaacagtgtggccaaacacacagattcaataagctataggaggggttatgaatttttaaaataatggattagctaatacttttgagacagggtttcattcactcccccaggctggagtgcagtggcatgatcattggctcactgcagtcttgacctcctgggcccaagtgctcctcctagctcagcctcctaaaaggctgggaccacaggtgtgtgccaccaagcctggctaattttctaattttttttttttttgtagagatggggtctccctgtgttgcccaggcaggtcttgaactcctggactcaagtgatcctcctgtcttggcctcccaaagtgttgggagtataggcatgagccactgttctcagccatgaatatttttgaaggagaaccgtgtacgtgggcaattgagctttttgcctcttcatgggagccatgttcaaaaaatgactgcgttagcatgatccaagggtggtatttttggccctctgttgttaaaagctgaagcagaggacacaaaaatccttactgtgcaccctctgtagacaggccagaaccatgtcatggttggtgttttgttatcaggcaaaaaggagggcagtgtcatgcggctgggtgatatcagtgtggggttgtttgaagaggctagtttctgtttagcctttagaaaagaaagcctcatggtgattagtgagtcaggagcggataatgagaggtgtgtgatcccccaacccataactatataactgagttgtatggccaataactcagtttttaaggttattctggggtctccttggtgaagagatgatccagtcagttggttgggggcttagagtttttagtttacactttccagtgctgcatttgtgctcttttgattttccttcaagcctgttagaacatctgttagttttttcctgtcgttcaagtagagtacaatcctcaatgttgtttgtttttatatctgttgaagagtgatggttttacttctttctgaaaattatcttttaataaatacatgtgttgttgacagaaggaagtcaaactctgtaaaatgtttgaagaggtttattctgagccaaatgtgaggaccatgacccatgacacagcccccagagggcctgagaacatgtgcccaaggtggctgagttacagcttggttttatacatttagggagacataggaactcgatcaatacatgtgaggtatacattggttcagtctggaaaggtgggacaactcaaagatcggggatggcagggtcagggtggtagcttacaggtcacagggggattcaaaggttttctgattggtgcttggttgaaagagttaaattaataatgaaagacctggaatcaatagaaaggagggtctgggttaagataagaggtttgggagaccaaagttcttattatgtaggtgaagtctcatagatggctacccttagaggcaatagatagcaaatgttttctgttcagacctttaaaagctgccagactctcaggtaatcttttcaggatcagaaagagacctggaaagggaaggggattctctacagaatgtaagtttcccctacaagagatagctttgcagggccctttcaaaatatgtcaaaaatattttggggtaaaatacttgatttgtttcagggcctgctgtctatatccttggatgctgtatttgagtcaggttggaatttcataccttatttctacaaaaagtctgtttcgtcagtcttgagacctctgtttgaatgttaatgctggtcatttgtgcctgaacttcaatggaggagggaataatgaggtatgttggactcctccttcctgtcttttttttttttttgagacagagtctcgctgcaacctcctgggttcaagcgattctcctgcctcagccgcccaagtagctgggattacaggtatgcaccaccatgcctggctaattttttttttttttttttagtagagacaaggttttgccatgttggccaggctggtcttggatccttgcctcaagtgatccaccagccttggccttccaatgtgctgaattataggcatgagccactgagcctagcccctccttcctgtcatggcctgaattagttttacaggtttctttggaatcgccttggccaagaggagaggtccattcagttagttgggatgcttggaattttatttttggtttacagtgcatttgcaggaggaagctaaaatcctgaaaggtatatacagaaaatatagtacagttagttgagagtcaagggtatgttccctgagacttgccagggtagaaactgttcgccctgcccattgtggacttggcccctggcacaaggcgtggcctggctgctgtgcccacgtggagggtctgggcaggagtccagccttcgacacacacgggcgtctcctgtaggagaataaccttgcaggatcagcctagagggctgctcgcctggctgtaagcattccttttgcaaaatggatgtcaactgaaaataaagtaaaaacattcagattagaggcttcctggaatggccaggattttctgtgatccctaggtcctcatagccaacaaacagcccagataagaagtcagcccagataagaagtcagcccagaccagcctggcgaacatggtgaaaccccgtctctactaaaaatataaaaattagccgggcatagtggcgggcacctgtagtcccagctacttgggaggctgaggcaggagaatcgcttgaacctgggaggcggagtttgcagtgagcggagatcgtgcactgcaatccagcctgggtgagagagcgagactccgtctccaaaaaaaaaaaaacccgaaaagaaaaagaaaaaaagaaagctctacaggcctgaacttgctgcttgtgtctgaggggtggggcagtcttggaactgagccctcactgccccacgcgcccccaccccttacctttggtcatggtgttgatgatcgctgtattgtgagagcagagggaaacatggcttgagagtttttctgaaatggtgtcaaatgacaatgttgaattattgagtcttactaattatagttctataatgtagcttatgaaaaccaaaccaagaaaactacagtccagttgtccttgattggataactagttattaatttctttcttctcaaaatctaattactttatttctaattatgaaacactaagaatattcagtaatgtgaagggaattatataacagccaccctttcacatcacccatatttgaaagataatacccttttgccctatatacttcaaatcaaaactttttagggaaataaaacataataaagcccacgatctccattttttctcccctctcttcccggtaaccaattgtcctaatggtgataattcattctcatgcgtgatacttttcctacagtatatttatgaataaaatgtatatttttggttgttatttatttagcatcaaaatgtatgttttttggttgttatttagaatcaaaatgctatgtctttttacatagcattatgtctttgagatttttcaagttttgtatttctatttttaaataaaaataaatatataaaaaatataaatatatataaataaatatataaaaaataaataaataaaaataaaaataaaaatgtctctctttgttgcccagactggagtgtagtggcatgatcatagcttactgcagccttgaattcttgggttcaagtgatcctcctttcagtcttctgagtagctgggactacaggtgcatgccaccatgcccggctaattaaaaaaatttttttgtagagacggggtctccctatgttgctcatgctggtctcatactcctggcctcaagctatgaccatgcctcgacctctcaaagtgctgggattacaggcctgagccaccatgcgggtctggagatttattatattgataaattacaggtgcagcctgttcatcgaactgttgtgtaatattctttttatgaatgtatttgttttctagggctgccataacattaccagatactgggtgacttaaagcaacacagtgcctcatagttctggaggccaggagtccaaattgaaagtgtcagcagggctctgctctttctgaaacctgtaaaggagagcccttccttgcctattccagcgtctggtggggggccagcaatccttggcttgcaggtgcatccttcccatctccacctccatcttcacacggccttctcttctgtgcgtctgttgtgtctttgtccacgttttcccctccttagaaggacaccagtcattggatttatggtctactgtactccagtatgacctcatcttaactacaggacatctgcaaggaccctgtgtctagttaaggtcacatgcacggggagtgggggataggacttaaacatgtattttgggggaatacaattcaacctacatcaatcaataaattacagtttattcattctcctgttgatggtcaattagattggttccaggtgttgtcatcatattagtggtgccaagaacatttttccataatcactgcatgtgcctgtgtgggcatgtgcaaatttctctctctctctctcttttttttagatagggtctcactcttaacaccaagcctggagtgcagtggtgcagtcttgacctcctgggctcaagcaatccttccacctcagcctcctgagtagctgggaccacaggtgcacacaccaccatgcctggctaatttttctgcttttttttttttttggagagatggggttttaccatgttgcccaggatggtctcgaactcctgggctcaaatgatccccccggccttggcctcccaaagtgctgggattacaggcatgagccaccatgtcccaccacatgtgacatgaatttctctagggaaacatctagtggtgggatatctagggtgcggggcatctgcttctttaactttgctagactccttccagggtttgtatcatttcacatgccctcccatttccctacaagtgtaccatcatctctgtgttaacagacttttgccaatctgcaagatggaaaatagtatttcattcttgtttttattatagtttccttaagaacagtgaggttgaatatctgttcatatgtttatgggccattcaggtgtacttttttgtaaattgcccattcatatgaatttttctattgggttgtctttttcttggtgacttataagaattctttatatattttatctagacactaagtcctctgttcctaaaataataccttctcctagtctatcttgttttctcactttgtttatggagacttttatcttgatattaatgttaatcattatcttattaatctttcatcttagttactatcttattaatgcaattttaagagctttttgtcatggaaaatctcaagcatatataaaagtagagagattagtacacaggacactccagctgcaccaccatcagcacgtggacaccttgtccaccctaccccacatggagctattttgggtttttgtttgtttgttttttgagatggagtcttgctctgtcgcccaggctggagtgcagtggcgcgatctcgtctgactgcagcctttgcctcctggattccagtgattctcatgcctcagcctccggagtagctgggattacaggcgctcaccaccatgcctggctaatttttgtatttttagtagaaacggggttttgccatgttggccaggctgctctcgaactcctgacctcaggtgatccaccagccttggcctcccagagtgctgggattacaggtgtgagccaccgcactcagcccaaatggggctattctgaagtaaatcccagacctctggtcatgtcatctgtgggtacatcatgatatcatgatgcatctatgaaagacaaggactcaaaaacacatggctgcaatgccatcatcttcccctgccaaaattcacaataatttgcaatttcatcaaatatccacttagtattcagttttctgcagttgtctttcctttttttttaaattggttaccatgaaatgggatttataatccttttctttatggtttatgttttttgggtcaaatttaagaaattctgccttattccaaagtacaagaaaaaagtattcagtatttccttctgattgttgaaatttcgcctttcctacttagatttctagccacgcactggggtatgtggggatccatggtgatttgttttcttacctgggtagctcagtgctgcagccgtgccccattgatggccagtccctcctccccccacaggtccctcctgccccctctcatgactacagagcccattgtatctgaccccctctctctgcctgctctgcgcctgctcttcgcctgttcccactgctggacctggctggaggaaacagccatacgtacttctcgctggtcccctgttttcctgcttatcctctccccagccctcgtcccgcctctcaccctgagctgctgactctgcttctcagttctgtgagcaaacagatgccaacagggagcatccacactctcccgccccacacccaccaccacctgtgtctgtgtccacgtcctcagcctcccttgggtgcgtgaggactgtccacgctgccaaagaaggcagctcctctgctatgcgccagaccctcctgtcacactctccagttccctctctcccggggtcattgattgtgttttgtttgttttcctttctatggtatcattctcatccacgtacaaataggctgagatttcttccactttaaaaaaaaaaggctcatccctgtgtcttccctccatcttttgcacagtctctttgctcttttttttttttttttttgagatagagtttcgatcttcttgtccgggctggagtgaaatggtgcgatctcagctcactctaacctctgcttcccggttcaagcgattctcctgcctcagcctcccaagtatctgggataataggcatccaccaccctgcctggctaatttttgtatttttagtagagacggggtttccccatgttggtcaggctggtgtcgaactcctgacctcaagtgatccacctgcctccgtctcccaaagtgctgggattacaggtgtgagccaccacgcccggcctctttgctcctttttctgtcaaaagtcttctaagagttttctgtgttcactctctttagttctctcctctctcattctctctctctctctcttttttttttttgagatggagtctcactctattgcctaggctgcagtgcaatggcgtgatctcggttcactgcaacctccgcttcccaggttcaagcagttctcctgcctcagcgtcccaagtagctgggattataggcatgtgccaccacgcctggctaatttttgtatttttagtagagacgggtttttaccatgttggccaggctggttttgaactccaggcctcaagcaacccacccactttggcctcttaaagtgctgggattacaggcgtgagccaccgcgcccagtctcctctcagtttcttttaagcccactatgattatgctgtcacccatgccctcgtccaagcctgtccttgtggaggtcaccaatgaccttcactttgccaaacgcggagggcaacactcagcattcattgttctcccctcaacacccattcttcacttgggtccaggacaccacacttggggtcttcctcccccgtcactggctgttccttctcaggctcattcctcactcgctgattccttcccatctccctgaagtgttagtgttgaaggaccccagggctcagtcttctagatttctcttttcttcatccaccattattccctgaaggatgtcattcattcttaaagtttaaatatcacctacaggcccggcacagtggatcacctgaggtcaggagtttgagaccagcctggccaacatggtgaaaacccatctctaccaaaaatacaaaaattagccaggtatggtggtgctcgcctgtagtaccagctacttgggaggctgaggcaggagaattgcttgaaactggtaggtggaggttgtagtgagccgagattgtgccactgcactccagcctaggggacagagtgagactgtgtctcaaacaaacaaaccaaacccacatacagtcattcttggtatttgtagtagtaaagtccctacaaacactgagttagcaaatcctaaaccattcctcctggggaaaatacaaggttagcttcctgtaaacctgtggcctggtcacagcggtttcctcagttgacccatacataaccctggttttatgtgtgtttttgtggaagataccattctaatatatattgttgactcattaacaggaagctcatggccaacaggactgtaactcgtgcctgaacaaagcttctccaatactcgcattttctccataaggcacatcacagccttcccgtgcttagcaatgctagatagcatgtgagcactaagtgcggggcccttttaaacagcaaaatcaacccctcaaaaagcacaaaaatgtgcactaagaccatgcaaaggacacttgtttacactgtgagagctcaaatgagaagcagagtgttgtgggcagttgggctgctctaacaaacgtggcttcaacaacaaacatttctcacagttctggaggctggaaagtccaagatcgaggcgctggcagatccaatgtctgctgagggcctgtttctggtttgcagatggtcatcttctggctgtgttctcacccagcagaaagaagggaagccagctctctgggccccttatataaggcactcatcccattcttgagggctctgcacttgtgaactacttgccttccaaagaccctacctccaaatatcattccactggaattagggtttcaacatctgactttttggggacacattcagtctattgcaccctgtgtgtcctcagctgggaatgtggacattgacagttcacatttttcgaatgtccatgaatgacggtgaggttacaaaatacattcagcaggtatggccaggcacagtggctcacatctgtaatcccagcactttgggaggccaaggtgggcgggatcacccgaggtcaggagtttgagaccagcctggccaacatggtgaaaccccgtctctattaaaaatacaaaaattaaccaggcatggtggcgggcacctgtaatcctagctattagggaggctgaggcaggagaatcgcttgaacccagaaggtggaggttgcagtgagccaagatcatgccactacgctccagcctgggcaaccagagcgagtctctgtctcaaaaaaaaaaaaaaatcagcaagtagatgaattcatcaatacaggatctgcaaacaatgagggtcagctgtatactcacatcactctcaaagttttcgttttagcttgggcccctggcccttgaacttctatcgtgttacccagcttttctctgggatgtgtaatagatacctcagccttaatatgccccaaactgaagtccttatctcctcaaaccagctcttcccacatcccttctcatttaaacacactccatcctccagtttcttaggcaggaacccttgtagtcatcacggactcctccttttgtctgatgtccccacagatacaatctgtcagcagaactgagtggctctgccgtaaaatctgtccacacttgaccattcccgccctctcaccatcaccgtcctggtgtgagctgcttcatctcttggctggattgttgctggagccatccaactggactttcttttcttcctttgctacttgatgatttcttcttaaaacagcatcttcaatgatcctttttttttttttgagacaggatctctctgtgtcatccaggctggagtgccatggcatagtcatgactcactgcagcctcgacctcccaggctcaagggatccccctacctcagcctcctgagtagctgggaatacaggcatgtgccaccatgcccagttaagttttgaatttttttttgcagatatggggtcttgctgtgttgtccaggctggtctcaaacaatcctcccacctcagcctcccaaagtattgagattacaggcatgagccactgtgtcaggccaatgatactgtaaatcaagtcaaataaagccactcatttccccaaaattctccagtggcttctatctcacactgaggaaaaactaaattcttccagtaaaactctgggaactcacactattctctgctgttctctccccttgctctttctgttgcagccacactggtcttgctgttcctcagacatgtcagacatgcttctacctcagggcctttgcacttgctgtttgttctgtctcaaccgctcttcctccagatatctgcagggcaccacccctcgcctcctttgcccaaatggtgcctttccaacaagctgttccccaatacaccattgtaaattgcaactcacaccctcaaccaacattgtcttctttccttctctgctctgtttttcttcttagcattgattaccatctgaaaagcatattgtttttgtatatttcatcccactagaatgtgcttcctgaggtcagggatttttatttgtttcatgctctgctgtttccccagaaccttcgacagtgtttgtcacagagtggtgcctcagtaaacattctgtggatgactggatgaatacacatgagtctggttctagagtctttggtctgttctattgatgtattcatctatccagcaataccatactgttttaataggttttgttgtttggtaaattaatttctccttcttcattttctttcagttattgtggctattcttgtttcttacctcttttttttagttttaacatatgttgaaatcctaaccctcaaggtgatggtatcaggaggtcgggtctttggaaaatgattaggtctgagggcagacctcttactatagggaatgtccttataatggagaccccagagagccagctagttccttctaccccgtgaggacacaaggagagggcaccacatatgaaccagaaagtggaccctcacctaacattgcatctgccagtcccttgaactgcgacttcccagcctccaggactgtaagaaataaacctctgcatttatgagctacccagtttactgtattttgttataacagcctgaatggactaaggcttcattctatttttttcttctaacttcttgatatttagcttacttttattctttcctcttgttcaagtatatgtagtctaggctgtaaagatgtctctaattactgctgtattgattgtatcaagttttgctatgtagtgttttcatggtaacatggtaatccagttctaaatcttttgagttttattataatttcttcgttgtatttgtatagcatttgttatataaaatctttactgaaactttgattgtgggttaatatgcaggcagttcacatctgcttgtaaagactgtgttctccagttgttcatgaagggaattacatatgtctttgggtttagtgttcctagttcctcttttttgatggaaccttaatttttttttttttttttttgtgagacagagcctcgctcttgttgcccaggctggagtgcaatggcgcaatctcggctcactgcaacctccacctcccgagttcgagcgattctcctgccttagcctcccaagtagctgggactacaggcgcctgccaccacacccggctaacttttgtatttttagtagagacgggggtttcaccatattggccaggctggtcttgagctcctgaacttgtgatccacctgccttggcctcccaaagtgctgggattacaggcgtgagccaccatgcctggtccggaaccttaatttttaaaaagtctaatttgaaccaggcatgatgggtcacacctgtaatcctagcactttgggagtgtgaggtgggatgattgcttgagcctaggagtttgagaccaacctggacaatataatgagaccttgtctgtataaaatttttattctaaaaaaaggagctgattgtggtggtgtgtgccatagtcccagctacttgggaggctaaggtgggaggattagttgagcccagggaggaggtcgaggctgcagtgagccgtttgtgacactgcactccagccggggcaagatcctgtctcaaaaaacaaaacaaaaaaaaatccaagttgagaatctgtctcagctagtgagtttaatctgtttccatttatttaaatttaggcaggcctgatggcggtgagttatctcagttgattgttcacagtcatttacaaatcaaattccttgttctactactcccactttcgccgcctcatttcctgctttttaatgaacaggtttttaatttcctaattccttcctgttttccagtttgattcaccaagtgtttctaggtgaatttcaaaccccattcccactgtaaattcctccagggtgttgtgtctgctgattcttgtttatttggatcgcctccttgtgtataggttttcctgatgagctgctcttcagcgggtcgtatttttggcctggattgtggaagtcttgtggtaaagtggatttgcatttgcctctgcctggtgttccaggcagttcactggcccagagtcaattgtgttaatttctcagccaggtattcctactttgcaagcatggtatacatttgaggattgctttctttttcttttcttttctttttttttttgtttttgagacggcgtctcgctctgtcccccaggctggagtgcagtggcgcgatctcggctcactgcaagctccgcctcccgggttcacgccattctcctgcctcagcctcccgagtagctgggactacaggcgcccaccaccacgcccggctaattttttgttttttagtagagacggggtttcaccgtgttagccaggatggtctcgatctcctgacctcgtgatccgcccgcctcggcctcccaaagtgctgggattacaggcgtgagccaccgcgcccggccgaggattgctttcttttttcccttccactcagaatctagacggagatgggtttcttcgcacacacctgagcctggcggatggagctcttctccttttgctttggcccccttccgtgagacatgaacctttggggctcgacattgcaggcgtgggtctcttacaaattcccgtctcatgtgcttcgatggctctttctacacgtcgacacaaaatcctaagcacccgactgttagggtgtgctcctgagtcgggtcctgtcccccagcatcactgggccccgtcagcatctgtgggtgtcaccctcactctggctttctgtttcctctccgatcctgccccctgaagagtcccttttccctgtgagttctttcatcgctattttttgttgttttgttgttattcaatccggcatttctagtgtctatagccttactctgcagtgttgccagaaccagaagttaccattggtttctcacataataccatagatgtagctaaaatgaatttttttctataatcttgatttgaggtttacttaccatttatagcctttagatttgcagcattcagaatataacgcatgtttctctctccatagcccgacttaaatctctgcaatggctaacgaagcttatccttgtccgtgtgacattggccacagacttgagtatggagggctaggccgtgaagttcaagtcgagcacatcaaggcttatgtcaccaaatcccccgttgatgcaggcaaagctgtgattgtcattcaagatatatttggctggcagttgcccaataccagatatatagctgacatgatctcaggaaatggatacacgtatgtataaagttgtgtttctttgtttaaattcatacaaatttcagtggtttattttgttccctttaaaaaataaaaccacagcggtctgactatacagtatctactgtacattagaaacttccctatctcactgccgtgaagatagatgggaaatgtcttgggaaattaaacacccacctggtgctcctaaccccattcctgggtttcctgtcctcctgggagtacctggcctttagacttgctggacattgagaattcttttcccgtgtggggcctcagccagacgcaggcactggacatctgaggccagcctcacctgctgtcaaatggacccgtgactcggtccttcaacagctcagcctcgtgtcagatttcacggcccatttggacggcagggtgtccaaggctcctcctggtccatacacgtacggtcgtggccccctctgaattagactggggttcagaagtggcacagtgagaccttgctcccctccccaagtttacctctttgtctggccaagtggccatggccacctttggccaaggctgatacccgattgcttcttatttgccccggtgtaaagcgcagaggagggccagaaccttccttcctctccagcgtcggaaagcatcaacccagtgagccctgaggatggtgcacggctggatttcctttgttttcacagaaggagaagctggaaacccgaggatgagcctaccttgtttttctaggaagagaaactggcttaaaggaatcatgcccaccctggtgggatgcagagtcggtgctgaatgaaaagaccttccttgaagttttcctttttcacgtccccatgtgaggggacttaactttctaggggcaagcccagtaaaaataaataagtaaataaatagctagtttcagttgctcagccagacgcagtgctgagggcatgactgggctcattgcccttagtcctcctggcagccccttgagggaggagctgttattgctctcattttgcagattaggaaaccaggccataaagagagcgctttgcggctgccccagatcactggcccaagcagccgatcaaatggcattgctgtttctgttgtttcacggagggtcctttagcaggggtcaggacataaaagataaggaaagacccctgttttacaaagccctttcacaggtatacaactttttttgccctcgagaggatcctctggggttaggcagtgcaagtttgtcagatgagaaaatgaggctagaagcggtgacatgacttgtgaaggccaaggccacacagcagcatggggtgtaccgagcctcgaacttggattttctcactccagtttcagtgttcttctacccctataggaggagccctgttcctccaaccaggtggcaattctattttgggaaacaggactcaaccccagcggctggctctatccctctgggttgacttgcatggaagagcgacctggactggggccaggcttgtttgtgctctgctgcccgtcttagaacataccctctggataggaaactgtgcttcgtcgccgtcttggtggaggctgggaacattgcctggtcatagtgactggacaagttagccaggtgtgccctctggcctgaggctcatgtgaaaggccaggagtctccccaggctggctgagaggggcaggaggggccctcaaagccacccacgtcaggcccactcccccaggtgcctccacatcccatgccagcctatcccatgggagtgtgccctgtggatagcctcattgccagggctgggttaccagcaggctgccagacgctgtgcacctgcggttgtgaaacctaagagggcttggcccggtgccaggtggctgctttgctgcgatcaaaattggccttcacacccactacttttccttttctctgagccagaatcgccaacgtagcaagtttttaaataaatgcaagcaaaatactgagtcaagcaactctgaaactaagatcaattcatgtccatattttgcagaaccattgttccagacttctttgtagggcaagagccttgggacccctctggcgactggtctatcttccctgagtggctgaaaacaagaaatgcccagaagatcgataggtgagttatccgcagacgtggccatgtgcacgttgtggcccagggaggtgagagctgggtgggcttcacctttcagacactactccttaccttggggtaggacttctccatggccaatggaatccttcccctggcacaaaggagaaaaaatttttttttgtttttgctctgttggagcccaggctggagagcagtggcatgatctcggctcactgcaacctgtgcttcccaggttcaagcaattctcctgcctcagcctcccgagtagctgggattacaggcgcctgccaccagcccggctaatttttgtatttttagtagagacggggtttcaccatgttggccaggctggtctcaagtgctgggattttttttgtaattaaaatttttaggccgggcatggtggctcacacccgtaatcccagcactttggcaggctgaggctggctgatcacttgagatcaggagtttgagaccagcctggccaacatggtgaaacctgcctctactaaaaatacaaaaaacaaacaaacaaaccaaaaacttagctgggtgtcatgacgcacgcctgtagtcccagctacttgggaggctgaggcatgagaattgcttgaacctgggagacggagattgcagtgagccaagatggcaccactgcactccagcctgggggacagagcgagactccatctcaaaaaaaaaagaaattaattaattaaaaattttaaaataaaatagagatggggtctcactataggcgtgagccactgcacccagcggggatagcattctttatgtgatgatgatcaatatcaaacaatatttttatgagcaccatctatgaaaatagagattttagtgcatctgtcaccgagtagtgtacagtttacctaatatatagttttttggccctcacaccctcccaccctcccccttctgagtctccatagtccattatatcactctatgtgcctctgtgaatctactcatagcttagcttccacttataagtgagaacatacagtatttggttttccattcctgagttacttcccttagagaaatgacctccagctccatccaagttgctgcaaaagatattattttgttctttcttatggctgagtatagtctatggtgtatataggccacattttctttatccactcattggtcaatgggcgcttcggttgcatatctttgcaatcgtgctacaataaacatacgtgtgcagcccacctccactttggtacattgcttctagttgaaaatgtattctgagttccaaacaatcagtttgcacatgaatcatttgccagacaagggccactattcttggtcccctcatggctgaaatagtcctgatggcgttccaaatttggcttcactgggcggcagggggaggagacgagcaatgcagagtggggagttttggggagagagtgaacgtgtgaagtcagagagtgtctgggcgtctgcccatagttatggctgctcatgggagagaggagagaggagactcttctcctgggagactcaggggacagagaagactggggcactctgcagggagcagatcatggactcgggtcttacgaaccgtgctgtgggctgtggccttcatccccaggctgtggaagactgctcagctctcagctgggagtgaggcagttggacctatgttttgggaagagcccagcttgcctgcagctgtcaggcagttggaggagggctgggcttggcaggaagatgtgctgggatgatgcatcagttgggccagaggtagtaagggtggagctcccaaaagaagaaaccttggcaacttcaaaaacagttgctgatacagccctgttatcatcagcacagctctttgaggggttcacaaaataagcctgattcttgaatattttttctttctgttctagagagatcagtgctatcttgaagtatctgaaacaacagtgtcatgcccagaaaattggcatcgtgggattctgctggggtggaactgctgtccatcatttgatgatgaaatactcagaattcagggcaggggtgtccgtctatggtaaatctgccttgtgcatttttactccatgcagaagggaggggtggaagagtgacaacaatcacaagcctccccatccagtgtaacacaacccccaataatgtgaagactgcccatcttatggaaatgggttttaagaatctgaaaatagaggtggaggtttgtcatgcagttaaccagaggatgtcaccgggagtcaagaggtctgggtcccagtggtgtgactttgggaaagccacctaatctaaattctccatttcttcacctaggatgaaggggatagctttttttgtttttttaatgtaatgatgatcaatatcacacaagatttttatgagcaacatctatgaaaatatttttctggtggtggctaatgcctgtaatcccaacactttgggaggcttaggcaggcagatcacttgagctcaggagttcgagaccagcctggacaacatggcaaaaccctgtctctacaaaaaatacaaaaattagctgggcgtggtcacgtgcacctgtagtcctagctactccggaggctgaggtgggaaaatcgcttgagcccaagaaggtcaaggctgcagtgagccatgatcatgccgctgcactccagcctgggtgacagagcaagaccctgtctcaaaaaaaaaaaaaaagaaaaagaaagagaaagaaagaaagaaagactgatttttccaagatacaaattgctctaactgtacacaaacatgcacacacactaagaaagaaagcaaaggcagccagatgcgatgactcacgcctgtaatcctagcactttgggagtccaagatgggcagatggcttgagcccaggagttcgagaccagcctaagcaacatagagagaccttgtctctataaaaaattttaaggctgggcgtggtggctcacgcctataatcccagcactttgggaggccgaggtgggtggctcatgaggtcaatagttcgagaccagcctggccaatatggtgaaaccccgtctctactaaaaatacaaaaattagctgggcgtggtggtgggcgcctgtagtcccagatattcaggaggctgaggcaggagaatcgcttgaacccgggaggtggaggttgctgtgaaccaagattgtgccactgcactccaacccaggcaacagagtgagactctgtcaaaagaaaaagaaaaaaattacttgggtgtactggcacatgcctgtggtcccagcctctcaggaggctgaggcaggagaatcacttgagcccagaagtttgaggctgcagtgagctgtgaatgcaccactgcactccaacctggatgacagggagtgagaccttgtctcttaaaataaaaaataaaaaaaaaaaaggaaagaaagccaaggaaaacacactctaaaatcgaaatagcaatttatacatttttggccaaaacaaaccaaagttactacagcaatgaaataacattatatctgtatatagaaactgcttgctaaattcatgatatagaagcattcagaccaatagataaacgaaaacaaaaaagacacataggaaatatagcctttaaaaataatgcagatgctcctctacttacaatggggctaagtcttgataaacccatcataaatggaaaatatctcaagtcgaaaatgcatttaatccacctcacctaccaagcatcatagcctcacctggccgacccgaaacacctgcatcaggctacagttgggcaaaatcatctaacgcaaggcctattttataataaagtcttgaatgtctcatgcagtttattgaattctgtactgaaagtgaaaaacagaatggttgtctgggtacttggggaacagtttctactgaatgagtgtcgcttgtgcaccattgtaaagtcaaaaaatgaaagtggaaccatcgttaggcctgggaccatctgaagtggatcataaagttatactaatgattccttcttgggttaatggttcctcattgtggtattttcaactacttttagagttaaaaacgcctttaaatattgacttaggacaacacaaaaggacataaactcaaaaggcagtggccagctgcctctgggaacaatggagctgagagatgctttgtccagaccatgcttttgcgcgatttagcaaaaggcggtcgggagtggatgcctccccggcgccaccttctggccgctgttgtgtagtgcgtgagctgcagagcgtggccgggctcaggcccagggatatcaaaagaggcccatccacatgaagtagctttgctagagtggggaagggagcgtggtcacctttcccgtggctccctgcctcctgaagaggagttacaggtgaaggaggctctctctgttacttagctcttctgctgccagcaggaagtggaaaaaagttatgttatttacgtcttcttatcttaaaatggttaacttgctgcaaatcttttacttacttattttcgcatagaagtggacacacccacaggttgttttcagacaacctgggtcaggcagagcatgcttctaatttcagaattaatctcgaatgaatgctgagatgaaagatgaaaactattgttattattttttgagacagcatcttgttctgtcacccaggctggagtgcagtggcacgatcttggctcactgaacctccacctcctgggtccaagcaattctcctgtctcagcctcctgagtagctggggctacaacacccagctaattttgtatttttagtagagacaaggttttgcgtgggtggccaggctggtctcgaactcctgacctcaagtgatccaccccgccttggcctcccaaagtgctgggattacaggtgtgagccacctcgcccggccaaaaactgatttttatagactgacctgctaggcccaggcagtttcacacttccacacttccacactcgtggtctggtgcgagtctaaatacccactcaaaagacagctcctcttaccaacaaaactactcagtgcattcaagccagaacccgtgggacttgtgtagacctgagaaacttctcaagcgaaggtttgacattgatcctctttgtaaacgaaggtacatcccagcgggacattcctcaggctgctccgcatctttccatactaagcagcggacgaggtatcattcaattatttaatggcctgattcccagtccataaagtggggaggtagacagtaggaggatctgactaaataaatttctcttgtactcttataatcctctttttttttttttttctgagacggagtcttgctctgttgcccagagctggagtgcaatggcatgatcttggctcactgcaacctccacctcccgggttcaagccattctcctgcctcagcctcccgagtagctgagattgcaggcgcgtgccaccacacctagctaatttttgtatttttagtagagacagggtttcaccatgttggccaggctagtctcggactcctgacctcatgatccgccctcctcgacctcccaaagtgctgggattacaggcttgagtcactgcgcccaggctttgggttttttgtttgtttgttttgttttgacggggtctcactttgttgcccaagctggagtgcagtggcacaaacggctcactgcagcctcaactttccaggctcaagcaatccgcccaccttagtccccgcaagtagctgagactacaggcatgcaccaccacacccggcttatgtttgtattttttgtagagacagggttttgcgatgttacccaggctgctctcaaactcctgagcccaagccatccacctgcctcagcctctcgaagtgctgggattacaggcgtgagccaccgcgcccggccttcttttacgctaatcttacaagtggggccacttctgtggaatggctaaaaaagaaaataaagtccgcaaagcagagattttactttgaaaaatcaaacccaaatgttgcagttttctgtggcatgagtgtggggatcatgcggcatgggtgtggggatcatgtggcatgagtgtggggatcagacatcatgcctctgtgcttgtttttcaggcattgtcaaggattctgaagacatttacaatttaaagaaccccactttgttcatttttgctgaaaatgatgttgtgattccactcaaggacgtaagttggcatcttttctcttcgtatttatttatttgagatggagtctcgctctgtcgcccaggctggaatgcagtggcgcgatctcggctcactgcaacctccacctcccaggttcaagccattcttgtgcctcagcctcccgagtagctgggactacaggcgcccaccaccgcacctgggtaatttttgtatttttagtagagacggggtttcaccatgttgaccaggctggtcttgaactcctgacttcaggtgatctgcctgccttggcctcccaaagtgatgggattatgggtgtgagccaccacgcctggcctcatttatatatttaatagcacggtttgacattctgcggggagtgggaagtcttgaaggatgcatttgttgctccaaatatttccaacattaacattttaaagatgggttttattcaattccacttatataattccagtgtggaagtataaccttcccaaaacatgcttaaggaaatgtctgagggaagtattctcagcatggcctggttacctggtggagaaacgggacctcttgccccacctccatgctaacccacaaattacaataaagtctgtgaccttaaagacaaggatttattaaacaaagtcagttgataaggaaaaagcagaagaaaagtatggttcaaaagcagtcatttagctgggcgtggtggctcatgcctgtaattccagaaactcagaaggctgaggtgggaggattgattgaggctgagagtttaagaccaggctaggcagtctagctagatcccttctccacaaaaatataaaaaaattagctgggatggtggcacacatctgtagtcccagctatttgggagcctgaggcaggaagattgcctgagcacaggagttggaggctgcagtgagccacgattgtgccaccgcactccagcctgggtgacagagtgagaccctgactcttaagaaaaaaaagcagtcatttagaaattattgttataatattagtaactaatatattaatgcaagtgatttcaaataatagatgtatcatttttccatttccctgaaatctctcctttgccagacataaggactgtgttagttataaaattagcagtagaggccgggcgccgtggctcacgcctgtaatcccaacacattgggaggcagaggcaggcagatcacttgaggtcaggagtttgagactagcctggtcaacatggtgaaaccctgtctctactaaaaatacaaaaattagctgggcatggtggcgggtgcctgtcatcccggcttctccggaggctgaggcaggagaatcacttgaatgtgggaggcagaggttgcagtgagctgagatggcgccactgaactccaacctgggcaacagagtgagaccctgtctaaaaagaaaaaaattagtgggaaagaattcagtgtaactgtggaacttgtttctgatttaaagcattgatgttaaatttctgttatgaacgctcactaaagatttggagaatggaaagtatcactaaagggttaaaatcatgaaatcttttgcacaccaggtatctttgctgactcagaagttgaaagaacactgcaaagttgaatatcaaattaaaacattttctgggcagactcatgggttcgtgcatcggaagagagaagattgctcacctgcagacaagccctacattgacgaggccagaaggaatttaattgagtggctgaacaagtacatgtagcaagaatcaagggcaagccttcctagaatagctttcatcccaaaatttgcttggaaatagttagatcatttgatttaattttcacttttataaaataagtgtaggaatcctaaaattgattatttcatttgaaacacaaattcagtaggacgtaatgcatgaaataatttaatttttgacatgtacatcgaatcataatttaaaaacaaggtctgaccaggtgtagtgcctcatgcctgtaattccagcactttgggaggccaaagtgggtggatcacctgaggtcaggagtttgagaccagcctggccaacatggtgagaccccatctctacaaaaaatacaaaaattagcctggtgtggtggtgcacgcctgtagtcccagctacttgggaggctgaggcacaagaatcaatagaacccaggaggtggagactgcagtgagccaagattgtgccactactgtactctagcctgggcagcagagtgagaccctgtctcaaaaataaataagtaaataaataaataaataaaataaaaaccaggtcagtacctggagaatttgaatgatagagaatgatagagtaataccctaattattagttaaaacctacaggccgggtgcggtggctcacgcctgtaatcccagcactttgggaggccgaggtgggtggatcacttgaggtcaggagttcaagaccagcctggccaacatggtgaaaccccatctctactaaaaatataaaaatcagccgggcatggtggcatgtgcctgtaatcccagctactcaggagtctgaggaggagaatcacttgaacctggaggcagaggttgcagtgagtcgaggttgcgctactgcactccagcctggacaacagagggagactctgtctcaaaaaaaaaaaaaaacctacagctgttcaaggaccagctgacaggtcaagtgtggccttttctggtctttgaacacatcatagaaagtgacaaatgctgcaaagccatgaagaacatgaactataaacgggtagactaactgcccagcttagacacttatctatgccacaaaacagctgaatttgtcacatttatatattgcaatatgggaagtattgagatcaaaacaggattccattgacctaattatattaagctaataaactaattttttgaatttttgaatttgcagcttttttaaaaagatagcagagaacggtgggctagagttgtcacccagctgttgtctcctaagcagtggatttccaagcactggcatttttgggtcccagggcctgaggctacctcagaaatatctcctgtgtttctggtggtggcgtaaaggggagagccggtgagaaactctgcacctgcacctacggggtgcgtacatgtgactttgggcaagtgacttgatgttgtagtttttttcctaattttgtcttgacgtccttctcaggagagagtggctgtaaactctagccctgccctgacggggatcctggggatgtggtcgtgggtgtttcccatgtgcctttcatgggatccttctttgacctcacagacggcctgattcctgagtgtccaacctgtggccaggtgtccctctcgcaggaagcttgtttatcctggcacatgaccttgtggctctcatctgacctgtgtccagtttattcctactgagacagccactctcccggagagccctgaccgggaaagaagttaggatggggtagaggaggcaactcatcagaacccaagaaatgacagaagcagtttattgcttacagatccagagaacagagggcagcacgcttcacagggccagcaaaaagggggagccattcaggacacatgggctcaaccagaaggtggagaacgagagagagagggagctatgagccaaagccttcactggggcccagggtgtcatctatgcaggtttcccctggaggttctaactggggggtttagagcaagcaggcatgagccccggggactcacgctgtgactgagaggggtcggtgtgggtaggatatcggcatggtccatgtgggtgtgggggtcagtgggacaagtcaagcaggtggtatccagctgtccatgggaaggtggtcccaggaggcggttttgtaaggcagatgtctggatcgaccaccttggggaacagtgagaagttgtataactggaaactgtgttactaatccctgcttctagtatgagaaagtccaacttacattcaaatagatgctcaggaaacataaaattcaaagaattcccaaacttgagcttcctgagcctcagtttttgcatctgtcaaatgggtatggggagaccctttgcctaatgttgagagaatccaagcctgagcagggctggtctactgtggacacttagttgtggaccccaacaggccaaagcccttgcctgctgagggctgctcccaggaggcctcacacattcatccggcctcccaggaaacccctgagatgtgctgggcttttgccgtggaacggtgtcggtgagcatgtggccagtagccagagtcttcaacataggtgggaggtctgaaattcgtgcgagaatgaaccaagggtgtggctgtatccttcatggtgagcttggggcctgggcagccttccctctgctgagtcctttggtcaaatgtcatggtgttctgaaccagcactgcagatagaagtataatgtaagtcacacacgtacttctttaaaaagatatgttcttcagtgactattagacaaacagataaatgaaggtaaagggaaaaaatggcaactttagcttttttccccatgtatgtaattttaaattttcttatagccccattaaaaaaaggaaagagacacaagtgaaattaattttaataatgcattttagcccaatttatcacaaatgttccatcagtgtgtaatcaatgtaacgaatcatgagtgagatattttgtatttttttttttttgttcctctatctttgacatctggtgtgtattttctgcttacacatatctccatttggatgctaacttttcatcagaagtacttgatttggccaggcacagtggctcatgcctgtaatcccagcactttgggagtctgaggtggactgatcatttgaggtcagaagttcaagatcagcctggccaacatggtgaaaccccatctccactaaaaattcaaaaattagctaggcatggtggtgggcacctgtaatcccagctacttgggaagctgaggcaggagaatcacttaaacccggaggtggaggttgcagtgagctgagatggtgccattttactccagcctgggccacagagcaagaccatctcaaaaaaaaaaaaaacaaaaaaaagtacttgatttatgtttagatttcacaaaatttacagttgagaaaagtagatttacatatttaagttttccgataactgagtctagcatcaaaagtcatttcctttacagttcacctcccacattgacaaaactgcttcatttgttttagaacaattgatttgactttgaagcaaaagcgtatccgtttcaaaatgacgtcaatctaaattaagtgaatttactggcttttgtgtcactgtcatctcagtgctgacagcatcgaggtcagagggtctagcacacactgaacagagatccgagtgtggtgggatcaacagagctttccacaatattttttcttgtcgttttttcaggagaagttttttgtttgtttgtttgttttgagacagagtcttgctctgtcgctcaggctggagtgcagtggtgctatcttggctcactacaacctccgcctcccgggttcaagtgattcttctgcctcagcctccggagtagctgggattacaggcgcccaccaccacgcccagctaatttttctattttgagtaaagacagggtttcaccatgttggccaggctggtctcaagtggacctcaagtgatccgcccacctcggcctccccaagtgctgggattacaggcatgagccaccgcgcccagcccaggagaagtattttacactgcttcagttttttaatttaagtgaattaaaatgaaatgaaaagttgacctccccaggagtgctaaccctgtagcagggtagtcactggccacacctgcaagtctatactggcgaggaagattcgcatccccaactgcatcctgttgactttccattaatcctgtttgtccgccttatggcagccctgcagctggttgtgaaagaaaatagacgctcaggacccgaaagtcactatgccagagggaaagttcagcttgggaactgcgcaatactgccttcctttccttcccaaacagacagctgcaatgtcacaaccctgtgttagagcctcgtccgtaagccaggatcccacaaccatggaaggccacacatctccccagatggcctccctcccaaagcgctcacacagaaattccttgtgagcagctagatctttcaggctatatccaccccctataaactagccctgaaacaagttttttggatctcaccctgacgatgtcaattaccaggtgatcctcacagagaggac

SEQ ID NO: 735 - DNA, 12558 bp, Homo sapiens
aaaacaaagtgaaatgtaatcatacgatgtactttttttaatgccgttgaaacagagttaatttcctttagcacacaagtcttagagacaaaagaaaaaaaggtaagatatgtatatttatagctttggttattgttgtattttttttaatcatatttaagtttgttaagtctgtacaaccatctttgcctttaagaagtgatgaaaaataagaaaatatgattatattttcacatggtctacctcaaaaatactatatacctgagacatggccaaagggtctttcctaaataaagttagaatacaatactaagtaattgttttgcggggggcggggggggaaatggtttcatctagccaatcaaatttataagaatttttattttaaaatatgttaatcacagagcattctgaagtgacactaatctaaaagccaattggcaagataaaaaaaagactggccatgagttgatgattattgaagcaggctgataactattcttcttacttaggttttttccttgaaattttccattacaaaaaggttttaaatctgaaaaaaatctacacaatagttaaataaggaaacaaagttaattgtgtattattaacatcattctctaaatacattgaattctggcataaatatctaaaatacttaatggaaaaactacatttagattttaacaaaaccaaaataattacagcatctctttatttcatagcatataataatcatataaagtaaataacttaagaaacatgtacttgaaactttattaagaacaatgcttctttttcagtatctaccatttcctttgagtaaagctctttttttttcagtaacgtagatcatatgctaggtaaaaatgcacgtaattttgtgaaataacaaaagaaactgatattccatcttctattccagttttctattttatattagctcctaagtaatcactatatgaaactcaactatcatttcaaaaaaaatccaaattagaaaatattccaaaaggagaaagaaagcaacaatgactgacttccttttaaaccaactgttgaaacaggctaaactgactgatggataatttctgcataatctacttggccagctattctgcgtatctgattttctttttttaaagacacccaataatgctagcaaatgctttgtctggggacttactcagtgtcatgataatcgacatcaccccctctttcaatctttctcctctgaaaaggcacacaaatatgtgaaaactctcacagatagtatggatcaatcaatgtatttcacagcttcagacctaacgatgctttagatttgttgaatgctttcttgtacagaatctaccttgagctgagtatacactgcttccaagatctatccaatggaaaggaaaaaaaatccttttctaatccttatgatttttttcttttagcgcacttgagaaaacaattattagcattaaatagcagatacagataataaatataaaaccatactccgtctccatttccacataagctcacagtcctgtcttgcctccattacttttttcacctgcttctatttcatatcaacttttaacttaaatctagttcattttctttgtagcctatttgctttctttcactatccccatcctatttgtttctggaaaaaaaacagcacttcccttacccacctctcctcagtcacctctgcagcctactagagacatcagtaagaatttcaccacatcattgagaaatactgaaacaagccattgaaggagctgaacacctattcctataaatcattaaacataggtaaactaccttttgtaaatgatttaggcatccctcttctatgggcaatcatcttgaataagtgatagtttaaatgcacttctggctctaaaagggattctattatgatctacatccaaattttataaaatataggaggcagagtagcttttcctaacaaatttcatttaactatggaaagagaaaaggtagaaggggaatgtgcataaatggatcaacaaatcaaaggcaatgaggaagttgactagaacagactagcactaaaatagcagtaaattccttattgctaacgaggcgagagactttagtatgctgcatggattcttgcctactctgattagtttttcttttttttttctgagacagagtctcactctgtcacccaggctggagcacagtggcatgatcacggctcactgcaacttctgcctcccaggttcaaacaattctgctgcctcagcctcccaagtagctgggattacaggtgcctgccactgcacccggctaatttttgtaattgtagtagagatgaggtttcgccatgttggccaggctggtctcaaactcctgacctcaggtgatctgcccgcctcggcctcccaaagtgctgggattacaggcgtgagccactgcacctggcagacatgatcttacacttaaaaaattaaaaaaaaaacaaaccctaaatactccacaaaaaatctgtaaaaactgacaactgaattcagtaaagttgcaagatataaaatcatcatataaaaattggtagaatttagatatgccaacagtgaagaatctgaaaaagaaatcaagaaagcaagcctgtttacgatagctacaaagaatataaaataccttggaatcaatttaaccaatgaagtgaaatatctatataacaaaaactgtaaaacactgatgaaagaaactgaagaggatacaaaaaaaaatggaaatataatccatgttcatggagtggaagaacattgctaaaatatcaatactaaccaaagcaatttactgattcaatgcaattcctatcaaaatacagtgacgctcttcatagaagtagaaaaaaaaatcctaaaattcatatggaaccataaaagatcccaaatagctaaaacaaccctcagcaaaaaggaacaaagctggaggcatcacactacctgacttcaaaattttctacaaagctatagtaaccaaatcagcatggtactggcatcaagacagatccatagaccaatggaatggaatagagaactcagatataaatacacacatttacatcaactcatcttcaacaaaggtgccaagaacataaaatggagaaataatagttgtttcaataaatggtgctagaaaaactgcataactatatatggaaaaatgaaaccagacccctatctcttgccatatccaggaataaaaatggattaaagactttaataagacctcaaactataaaactgtttcaagaaaacactggagggctgactctcttttcggactcagcccaccttcacccaggtgaaataaacagccatgttgctcacacaaagcctgtttggtggtctcttcacatggacccgcatgaaagtggcacatgcctgtagtcccagctactcaggaggctgaggcatgagaatcacttgaacccaggaggcagaggttgcagtgagccaaaatggcatcactgcactccagcctgggcaacagagccagactctgtctcaaaagaaaaaaagatctggttgtttaaaagtgtgtagctcctccctctgctctttcttcctccttctctagccatgtaagacatgcctgcttccccttcaccttccaccatgattgtaagtttcctgaggaccccccagacgtgcatcctgtacagcctgtggaactgagtcaattaaacctcttttctttatttaaaaaaaaaaaagagaaaaaaagaaaacgttggagaattgctctagaacactggcctggacaaagatttttttgtgtctctaagacctcaaaagcacaggaaaccaaagcaaaaatgtacaaatggggtttcgccaagcaaaaaagcttgtgcacagcaaagaaaatgatcaaaaaagtgaagagacaacccacggaatgagaaaatatttgcaaactacccatctaaaaaggggttaataatcagaagatataaagagctcaaacagctcactagccaaaaacaaaccgataaaaaacaaataatccaagtaaacatggcaaaagaactgaatagatatttctcaaaaaacacacaaaagacaaacaagtatgtggaaaaaatgctcaacatcagtaatcactcagggaaatgcaaatcaaaactacaatgatatataatctcacccccattaaagtagcttctatcaatatgacaggcaataacggatgctggtgacgatgtggagaaaggggaaccctcatacactcttgggaatgtaaattagtatagccactctggagagcagtatgaaggttccttaaaaaactaaaaatataacacttacatttacatttgatccagtaattccactgggtatacatttaaaaaaaagagatgaatatattaaagagatagctgcactcccatgtgtattggaggactattcacaagagcaaaactatggaatcaacctaagtgcccatcaacagatgaatggattaaaaaaaagtagcatatatatacaatggaatattattcagccataaaaacaaatgaaatcctgtcatttgcggcaacaaaaacggaaccggaggtcattatgtcaagtgaaataagccaagcacagaaagacaaatatcacacattctcaccggcatgtgggagctaaaaaagtggacctcatatagattaagagtagactagtggttaccagaggctggaaagggtggtagggagggaggaatgcagaaaagtttattaatgcatacaaacatacagtttgcttaaaaaaagaaggcctagtgttagatcagtagggtaattatagtttacagtaatttttttccttcaacttttatttttaagttccggggtacatgtgcaggttatgcaggtttgttacataggtaaacatgtgccacggtggtttgctgcacagatcaacccgtcacctaggtattaagcccagcatccattagctattttctgatgctctccctctcgtctaatttactgtacatttaaaaacagctagaagagaatttgaatgtttccattataaagaaaagacaaatatttaacgtgttggatatcccaagtacattaatttgatctttaaaaattatatgaatgcactactttatcacatgtaccccaaaactatgtatatctaccacgcctcaataaaatttttaaaagttaccatggggggaaaaagagtgctaaagattctcatctcccacagttttaagtcaagaataatagatagataatgccaatagataatgcctaaaattgaaaaaatcaagaccatcaatataagcatatacttaaacatgcataaatatacgttttcctgaatttcttttgtgcacttctatattaaatttttaaaatttacaaccacttaaattgctttaaagctcctttcatgagatctagaaactaatgagacacacttaaaaatattaattttctctaaaaagaaaaaatagaaatcagtctcattcttcaaaggggctttctagtttattaagatcagagtgcaaggatggtgaatggccatgcacttgtttcacattttatgtatttcaagaaaaagtagatttgaaaggccagggtaagtggctcatatctataatcccagcacttttcaaggccacgccagtggctggggggaaatggctcgcacccaggagtttgataccaggctgagtaacacatggtgaccccatctctacaaaaatttttaaaattagccaggcatggtagtgcatgcttgtgtttcagctacttaggaagctgagttgggaggactgcttaagcctgggagatcaaggctgcagtgagctgtgaccatgccaccaggtctgtgtgacagagtgagaccctgtctcagccaaaaaaaaaaaaaaaaaaaaagaataaacagattcaaaagagggaaaaataaaaatgtccttaatgaaaatactctcttttctatcaggtctgcaacatgaaagtcacaggcatcacaatcctcttttggcccctctccatgatattattatcagacaaaatccagtcttctaaaagagtaagtttttacaatcaaaatagtaaaaatattttcaaaggtacattttctgtatatttagtaaaatataaaagggcaataagaaagcaaagaaaatctgacctactaaaattaagagtttatttagctctgtatatccaaattccaatttgacaaaagcagccttcatttataaaaactgagttctttaaaagttgattaaagggagagatctgaaaattttcactataaaatcagaaattagttttaagagtaaaatcttgtttaaaatgtaggaaacttttttttaaaaagcacatatttatgagagaaactgctattgaattattattggtgaaaaaatctaactgcaaaaacagtaataaaccagaactattcttagttctatttattcttagtttactgttcagtaaaaacaagaactatttctttctttccatctatatccacataaagaatttcagattgtgtggctctttaaattcaatacctggctccatttctgataaaagataaatatttccttttaaaacaccaaactttgagctgttaaacccagagagtttaagagagttaaaccagagagtttattcagactgattgattgattgcttgcttttgagacggaatctcgctctgtcgcccaggctggagtgtaatggcatgatctcagctcactgcaacctccgcctcctgggttgaagcgattatcctgcctcagcctcccaagtagctgggattacaggtgcttgccaccatgcccggctgacttttttttttttttgtattttcagtagagacagggtttcactgtgttggacaggctggtcttgaactcctgacctcaggtaacccgcctgcctcagcctcccaaagtgctgggattacaggcgtgagccaccatgcccagcccatttattaattattgaacagccctaggtataatgttgttagctctgctgattttaaaaacacatatagtttaaaataatttcctcactataaagcaattgtgcacactggaatattaaatgttaacagaattattatttaccatacatttccacatatataaatgggaatattccagtagcattactttctgtaatgatcatgtaataacagttggaaaatacccgtatgacaaattggaatctctttgttcaattgtatgtatcagaatatccttaatttttagtatttcatcccaataaagaaaaagatttgctctactgtaacaccaaaatattagatagtaggtttttttcccaaaataacgtccttctaatgtctaagtgcttaaatatgaaatttggtgaaattctattaattttttttctgattaatgcctttcttttttttgtttttctaggaagtccaatgtaattttactgaaaaaaattataccttgattccagcagatatcaagaaagatgttactatacttgatctcagttataaccaaattactcttaatggtacagacacaagagttctacagacatactttttactcacagagctctatttgattgagaacaaggttactatcttacataataacggttttggtaacctctccagtctagaaattttaaatatctgtagaaactccatctatgtaattcaacagggtgcatttttaggcttaaataaactaaaacagttatatctctgccaaaacaaaatagaacaactgaatgctgatgtatttgtgcctctaagaagcctaaaacttctgaatctgcaaggcaatttgattagctatttggatgtaccaccactatttcatctggaattaataactttatatggaaacctatggaactgctcttgcagtctatttaatttgcagaactggttgaacacatcaaatgtgacattaggtaagctatcataattaagcaaaaccaaaatgtgattaactcaatgttccaccacagaaaaatctctcatatcacgttttaaagaaaaggaagcagccaggcgcagtggctcatgcctgtaatcccatcactatgggaggccaaggcagggggatcacctgaggtcaggagtttgagaccagcctggccaacatggtgaaaccccatctctgctaaaaatacaaaaattagctgggtatggtggcgcatgcctgtagtaccaggtactcaggaggctgaggtgggagaattgcttgaacctgggaggcagatgttacagtgagccgagatcgtgccactgcactccagcctgggcaacagagtgagactctgtctcaaaaaaaaaaaaaaaaaaaaaggaaaggaaacaatttctgtttaagcaaaacaggaagaaacactaaaaagtaacagctgcatagatgctctccttccccattaccagggggaaaaattaagaaattttttttttttttgagacagagttttgttattattacccaggctggaatgcattggcgtgatctcagctcaccacaacctccgcctcccaggttcaagtgattctcctgcctcagcctccccagtagctgggattacagtcatgagccaccacgcctggctaattttttgtatttttagtagagatgggcttcctccatgtttgtcaggctggtctcaaactcccgacctcaggtgatccacccgcctcggcctcccaaagtgctgggattacaggcatgagcctctgcgcccggccagaaatgtaaatgttctatacatgtgagatgataatgtcatttcatgtattgttagcaaagtcaatatgtcagactaattttttaaaagtgcttcctagactaagtgaaaacaagtgacgtattttaactgcaaaccatactgtgcctgagatccagattgtaaccatgtaaccacaatattaataataaaatctacactaatacagataaactaaataacaaagatactgcatttaagccatatttataaaataataaacagaaatgtgcatcattctttcattatgttgctagacaaatacaacaggaatttcttataatgcctttaagaatgacaaatatgtcaaaaattctagataaaacaattataaaatgttgttaactattatttttctctatactaaatcttattctttctgatttactagaaaatgagaacatcaccatgtgtagctaccccaacagcctgcagagctacaatatcaaaacagtacctcataaggctgaatgccactcaaaatttccttcatcagtaactgaagatctttatattcattttcagcccatcagcaattcaatatttaatagctcttcgaacaacttaacaagaaattcaggtaatatactggttctatatattaacactgctgaatgtatcatactaaataaactgaggtagttatctttattttaaatttgtataaaaaatgtaaaagaaagattcctcatctcaactaaagatttacaaaatattgctcttccaaactaggctctgctagttacaagccaaatgccatcgtgcaaattatttaacttctctgagcctttgttttaactagtctagtcacaaatcttaacgagtataaatcaataatggtcttaggtaaaagggtaacaaaattgcaaacacagctattttgaacaaagagaattcatccaccaaacaaaatctaaagaaaactacaatgtatgtttatttttaataccaatattgaggagaattaggatatataattatgattattttgccaacttaacaaattttctttctctctcctctcttggtattccattaaagaacatgaacctcttggaaaaagttgggcttttcttgttggtgttgttgtcactgtactgacgacttcacttctcatttttattgctatcaaatgcccaatatggtacaatattctgcttagttataatcatcatcgcctggaagagcatgaagcagaaacctatgaagatggttttactggaaatccaagctctctttcacagataccagaaacaaactctgaagaaactacagtaatatttgaacaattacattcatttgtggtagatgatgatggatttattgaagacaaatatatagatatccatgaattatgtgaagaaaattaatttctttcaaagtttgctttttaaagcaaagttatcagctcactcagtttagatatggagattttgctatgtgacataacaaaatacagctggcaggcattcatattaatgacaacatacatgaatatcataaaattatgttctttgcattatattgagcaagcaggttcaaatacagtaactgacactcctcggtagttgacagttacatagtctacaatactagcactactattcttagcagtgcttgggtgaccatacgaactagtaaaaaggtctaaattattcatgaattaaaatgaatggattctcatattaacacaggtatttgacataatatgtattaagttatactaatgtttcaatcagtaaagaaataaaagtttaggatttattaatatatggaagtcaaagtgaggaacagagatagcttaaataatacactaagattgattttatgctcccagaataaaatcatagagttggaaaatatttttttgaaatgcttcctgaaatagcacaataaatttccttaaaatttcatagcaatttaaagcacaagcacaatgttcaggcataatccctaataagtcactattgattctggttataaagaaaggctgtcaccataatgcaggatcactacagtttaatgtcatactggcttccaaagtgggcatcacaattatctataaatcttgttttaaaaatacatatttccacctctctctgggagatttttattcaaattggtctgtgctgacactaaggaatcttcatgtggtccatggacagctatttctatctattcagtagatagagcaatgtttcccaaattgtttttctagaatactaatttccagagagacattcacaagtatttacagaagaagaaggaggtacatggtcaaattactacaggaaaaactagtagtttaaacaaggtgaaacaagattctttttcttttttttttttttttttttgagacaaagtctcgcactgtctcccaggctggactgcagcagcgcagtctcagatcactgcaacctccgcctcctgggttcaagcaattcttctgactcagcctcccgagtagctgggagtacaggtgcacaccaccatgcctggctaatttctgtatttttagtagagacagggtttcaccatgttggccaggctggtctcgaacgcctgacctcatgatctacccgcctcggcctcccaaagtgctgggattacaggcatggagcaccgtgcctggccaagattctttacaataggatttatgtaaaactttactaagctaaactgctctctgattattcaagagcaaagtattaaaaatttctcaaacttacttgacaacaaaacccattctttcagttacatctactaagagctcgtagttcaataacattccaaagaacgtagtttggaaaacactggcctatcggctgtaataggaagggtctaaagaaaattatttgctgagtcctcataatcaattggctataatcacaatttaataatttatcaatgcaaacagtacattaaaaactgtagcacaatctataatttttaccttcatatgcagagaaattaagaatttacatcttttacaaatatgtatatctctgaaataatgaaatatattgatgggtgaaataatatttctggtattttcttcattataacacgtggaatggaacagtggctagaggtatggatggagcaaggtcaaatatgagctgatggagctgggagctaaataagggtataatatgctacttctgtgtatgttgtgtatggtatagtatgctatttctgtgtatgttcaaattgtttatgtatataataaagttttaaaaatttgtatgtacttgacaattccttagaaaaaagaggctaaaataaaatagatctatgtcataatctatagaatagtcattttaaaagttacataattagtaaattcaatacaaatgtctactgagagaaaataaaaactaggatgatatacctgtaaaatagaagaacttactaatttataatacatatttgcttgtgtttacagacacatgttttcaacaaaggatataagtatattatggctaatgtttctttatatatcaattatactttgttttaaaccttaattataagaatgagatgattataggaacataaaatatctttttctaaacaatgtatcattctgctaaattatttcctaattataagatgcaaatattaatatttgagaaatgtagcaaaatgaaatataattgcaaatgagcaaagactacacttaagcttttatattcaagggcctctgttgaatatggggtattcaataaatatctgactacacaaagaaaaataaa

SEQ ID NO: 736 - DNA, 9601 bp, Homo sapiens
cgctataaaacccaggccggcaggatcgctgcacccgcggcggcctcctcggtgcgcgacccccggctcagaggactctttgctgtcccgcaagatgcggatgctgctggcgctcctggccctctccgcggcgcggccatcggccagtgcaggtgagctcccgggctccggccccaggtgcccctcggcggtcccctccgtgcccccagctcccgcccctgcagaggatccccccgcgggcgaccggtgagcgtcggtggcgctggggtcccgggttgcgtgtgcgccgggggccgcgagggtgcgggaggactgggcagcgcgcgagcttgtgtgtgcacacgcgtgtcagcaccggctgggggagcgtgtgcacgggtgtgcgcggtgagggtgtgtgcgcgtggcccggcgagacgagttgggagtccctgataaggatgcgtctcaggccgggcgcgggtgctccagcctgaaatgccagcacgttgggaggcagaggcgggtggatcacctgagcccaggagttcgagaccagcatggccaacatggtgaaatcccatctctaccaaaaatacaaacattagccggacgtggtggcacacgcctgtaatcccagctactcgggaggctgaggcccgagaatcgcttgaacccaggaggtggaggttgcagtgagatcacgccactgcactccagcctggtgctccgtttaaaaaaaaaaaaaaaaaaaaaaaaaaaaaaaaaaaaggatgcttctcggacccgcctcaacgcacgccttcttttctcacccagcctcctccgtctgcccgtgggtttccgtccgtcccgctgggactcagcgctgggtgactgccccgcggccagagcaagggcggtctggcagggtcctggaagccgcgcttcccacacgggttccttgcccctgagggtcgcaagctcccctggcctccctaacctccagcgctgaattgggagcctggcgggggcggggggtgggggacccggagccccaaggcctctgcggagccggtctttccggacagggtgattttcgtttaaagattaatggtgaagccgagctcttaattattcctctaggtgggaggtggcaggaaaggcatgttaatatttgataagaagctaaaggcgcttcaagcggctgggcacagggatccgatcctggaggcaccttctttgcaaccccagaccccatcaccggaagaccccctctgccagttctcagcccaaccacccctcggatggttcttggggtccacgcaggctgaaacctcctctcccaagttaggtgctccatcctcaaagcggcggagtgaggggtgaaggtgtcctctgcacagagaggagccagcgtgtgccctttgcagcagggactggctgagctgtcttagagggtcgaggggcaccttgcagcctctccaccgggcccctgggagaagaaagagaaaaagcagaatgtggaaacttttatttgtagggttggacattggaaacctactaagcagctagaaagtagaaagagaaatgctttgcagttctggtgctttgtagctgtgtggtcttgggtaagtcacttcctgtcccatttgcaaaacaggtgttgtcattctgacttcaggggttttaagcgtttgaataagataatgggtttaagtgattagtgcggtgcctgtgtggcacgtggctggtgtgtcatataccaagtttatggggctctcccccaagcctggggccagtgtcaggaatgtgtctcagctcacccctcacacaagctgctatcccctttagtgccaaggctttctgactgggacctgccttccattcatcttatggaggactcaagctgagaagggaccaggttgcatatggcgacccccagagcatctctgtccattgagacaagaggccgggtgaggatatttggtccccttcagagccccagacccctggccgggagcgactgagactttgcccaggaaacacttgggttgtgctgagctgtttttcaggattatcccctgtccctcagagggggaggtggggtgagcaaggtccattagagaggcttcttcagccatcttgaaataagggggaggggtggcaggtcagtcagtgtggggggcagtagctgggtgacaggcgactgactttcggtctctaacctctggtcagggtggatggactaggtaggatgtggcgctggacaccgagacctctgggtaggtagcccctctccttcccaagccctcttgggagtggcctgagtcagtgggctggtacttacctgcaagggtggccctctcattcaacgaagacaggaacctgagtggtgggtgctcctgccaccagcaccccaccctcatccaccgacatggacctgacccctggccttgacctcaccaccattatgttttcctggctgctgcttcctgaagaaggtagttacaagtgcgttcagccaagcaggtcaaaagtctccatgattaagacagtggatcacaggtcaccactacaaacctaggagctgcggccagagccagggaagaccaaattcctaagaaaagctaagcctggaccagatgggccccagggaggctgtgaggcgagttacagggggctccaccctttgcagctggctcttggggatgctggctgaagggaggcttctcctggaatggctgcccccgggccctccagtcagagaagaggccagcccaatcttcaaaaccccttcctccttcaagacctctgcgggtggggacatgggatgattatggcaaggaactgtcatggtgcaaatgccctctgatttattatctccttagtcaccagcactgggaatttggtggctgcacctgtcagaggcgtttgaaccagagtgactccattttgggtgagagctaggaaaatgaggccgagatttgctgggctgcattatcagaaagtcaggcatttctagcctctagatgtttgcagttaagggaacaaattaataatatttactacacagacccagacttgggaaggtccagatactccgatatctggagagcaaaggcattcctaattttgctttaaaaataataatgttggctgggcacggtggctcacacctgtaatcccagcactttgggaggccgaggcgggtggatcatttgaggtcaggagttcgagaccagcctggtcaacatggtgaaaccctgtctctactaaaaatacaaagattagctgggcatggtggtacatgcctgtaatcccagttactcaggaggctgaggcaggagaattgcttgaaactgggaagtggaggttgcagtgagccaagagcccaccactgccctccagcctgggcaacagagcgagactctatctcaataataataataatatcaattcttggataatgtagtaattaagaaaattaatcctttatcacaaacccttgtagcagagcacatgtccccatatatacaacgcattgaatgcattccttccttctctgacttttgggaatgtcctactctgtctatggagtagctgtcctttcaccactgtactttcttaataaacgtgcttttcctttgcactgcagactcaacctgaattctctcttgtgcaagatccaagaaccctctcttggggtctggatcgggacccctttcctgtaacatgccttctgtcagaggaagattatgggactcagaatgtcagataactcccctgtggagactgagcaaaggcagagcgggagctggaggcttcggagctctgccccactgctggggtggcgagtggccactgccctctgcagaatccacccacatgggggtggttcaggtgcagcaactcccagggacagcagagccctgcccggggctggggatgggccatcagggggaggacactgcagctctgaaaaaggcgatgccagcagggaaggagaggcagtgatcagggcagggaaactccaaagcccaaagcagctcttcgtggccagttagttttcctggggatgctccctcatggctccttccccatcctgtccccactccggggactctaccctggcttagactacaagaagatgggactgtgggggcagcccaggcaagaagggagagggtggatgagctcagagacctcagctttggctgagtgggaaccgtgcttttcttaggaatttcctcatcttgatttctttccaagtcacttcatttctctcctctctcggcccctccttggctttggccatctgctcccaaaaggaggccatggggtgggtgggaggggtgggggggagggaaggagttgtcgatgggattttactaagtgccaagccgcctgaaacctcatttaatcctccccaaggccctatgaggtgggtatgtttgtctcatgttacagatgatacaactgaggctcagagagcttaagggacttgcccccaaacccatctaagccccctgagcggctcagccagaattccaagctctggatgagatgttgtgttcgccctgctggtgcagccttttaaaaaaattaatagactttatttttagagcaattttaggctcacataaaaattcagcaggaagtacagagggttcccataggcccttctgccctgcatgcactttcccctcttattaacatcttgcatccatgtgggacatttgaggtgcagcctttttttcagagatgctgggttctattgccctgaggcagagccctcagcctgtccccagagatcaggactgtgcggttgaggggcaggggaggaagcctggctgctttcctcctagcgggagctgtgagacgctagccaagaagggatcttagtaacacagggtgagacattctggggaggggccgcctaatctcctccctcatcttggatctgggaaggctgcccggttgaacctgactctattgtcccaggagcggaggctgggccaagtcctcctcttctcctctcaccagcctcttttccaggtttggggtgggggaggtaagcgcggaggaggctgctggtgaccaaaggatggagtatccaagccagccccatgttagagatgagtggcctcagagggcttccctggagggccagtggctgcttggcctggccctgcctggggaacagagccctatgccagctgacctgttgatcagcccctgcttggttttcaattgagtctctttttctgggccctcaatcctgctgccaggaacactccatcccagcccaagaggggctccaaccccaggggtaggcccagcctctgatcctcctgtgtgtgtgagcaacaagacacacgcacgcacacttcacacccttcctctctgctccagagtcacactggtgctacgaggttcaagccgagtcctccaactacccctgcttgggtgagtacagccagtccaggggactgctctttgtgcatggtgggcaccacgcaagccgaaatggagaccccggaagagtgggaaggggaggggtgatggtggcttcccaggcagatatcagttcccagcatacacacacacacacacacacacacactctctctctctctctcacacacacacacacacagatatacaaacacacacactcacacagaaacacacacacaacacacacacaagcacacactcaaacactcacactcacacatgcacacacacactcacactcacacaaacccacactcactcacacacacaaacacacactcacactctcctgtcctggtgctcagggaccagggagcatagagtgacctgagtcttcactggcacctgctgtcatcgagagggcatgttccctgtggaataaatcggtagcagcattaaaggaagaaaggcgttttgctgtttcccataataaaacggggagttgtttctatcccagtgacaccccttgcagggtgcctgagtgatggtcctttacgcttttatttgaatgctgaccaattcgaatgcaaaccctgcagtctgctgtgttttggtgactgagcagtgctgcccgctcctgaccctggcccacctggtgttggggtcaccagggttcggggaaccagctcctccagggttactcctctccctcccattcctcagatgatgctcagcgcccttcatcagcagcccccccgggggtcccactccacagtttccaaagccctctccatccacctcctttaaactctctgacatcccagggaagcggattatctctgcagttcccattttacatttgggaaacccagggcttggagaggccatgtgcaccacctcatgaagttgtccctaccccggagctcacagtcaacagttggcaaccctgttcccaccctgttccacactggggctagactccccagccttgcatgtatgtttctgtggaggaggaggaggagggcccagggagggcgagagtggagttcggagctgagcatccctgcagcacagccttcaggccaccccaaagcgtttctgtgtgggaactgagtgggtgggcctgacttcagtggggtggtgggggctacaccttggtgccaggcacccgactctcagcccaccttctctccctgctcagtgccagtcaagtggggtggaaactgccagaaggaccgccagtcccccatcaacatcgtcaccaccaaggcaaaggtggacaaaaaactgggacgcttcttcttctctggctacgataagaagcaaacgtggactgtccaaaataacgggcactcaggtgggctggatggaggccccaggcaggcctgggcacccgagttccccaaggactgagaggatggggctcctcccaggagggtgtgccagacccaggcccatctgtgctgtgaggtggctgaaaatcccatgggggaggacagcttccaggaggagagagcactctagtatgttttcgttacttttgtcagaccagtctgggatgtgggggcaggaaacgttccaggaagaaggacatgtgcaaaggcgcggaggcatggaacagctcggcgtgttcagaggactgccaggagctctgtgtggaggaaggacagacagtgaagccaggcagagcccaagcaaggcccaggggcagctgggctggggcccaagggcagatcacccaggcctgaggagtttggacattaccccgaggacaccagggcaccacagaggaggtggacgcagaggaggcaccaggacagagctgcagtttggggcagtggagggtgcaggagagggggaggcaggcagggagaccaaggaggaggccagggaaaggtccggggctgtcccaccctgtcccaccccgcgccacccctgcaggccagaaccagagctcatgaaggttgggaggcaggagacaatgtcccatctgggtgaagctgggatgaagagctagaggaggctgagggaggctggttcgaggactctgccccttctgtgctcccagtgatgatgttgctggagaacaaggccagcatttctggaggaggactgcctgccccataccaggccaaacagttgcacctgcactggtccgacttgccatataagggctcggagcacagcctcgatggggagcactttgccatggaggtgagggccccttcccgactgggaccttgtctgggctctgggcgcgcacctgccttgggcaaggagggtagtccaggcccttcataggtccccttttcacccctccaccccgaccagatgcacatagtacatgagaaagagaaggggacatcgaggaatgtgaaagaggcccaggaccctgaagacgaaattgcggtgctggcctttctggtggaggtgggactcccatcccccacttcccggggaacccggggctgagagcttcttcttaggattcagagacctgggactccagcgaggcaggagggggcggggagactccaacttccgcctctgtttctggggttgcatgtccccgggccaggtggggagcccagagcctcaatcccagaagctgcctggccttccgcccccagatcgggagaatgaactggccaccaccactggctccctgcagactttctcaagacccttccctccctttccaggctggaacccaggtgaacgagggcttccagccactggtggaggcactgtctaatatccccaaacctggtgagtcaggatgggggagaagggcttggggtgaggggggggattcctcccacaaaggaaggggtgggtgtgcggggagctgggctctcagagtgcaggggaagaggggctccttctcccaccctcactgacagtgtcctctgcccctatctcagagatgagcactacgatggcagagagcagcctgttggacctgctccccaaggaggagaaactgaggcactacttccgctacctgggctcactcaccacaccgacctgcgatgagaaggtcgtctggactgtgttccgggagcccattcagcttcacagagaacaggtgcacagggcctggggcagggcatgggctcccactgcctggctccccagaaattatccctctgtctgccctcagaggtccctcaggatacaggtggggagcccaggtaactgaagtccgttgttaatcatcgacattcactgaagacaggcaagaaaagcctgagctgttccatcaccagattgggggctagacaggaggcaggggaaggtggagtcattcagaaaatggtgctggggtttctatcatgaacgaggctctggggagacagcagtgagcccaaaggacccaaatccctacccttgcactgctttcattccaaaacagtggttctcaaagtgcggcccctggaccagtggagtcaacatcatcactgggggaatttgttagaaatgctaatcctcagagctactgaatcaggaactctgggggtggagcccaggcatctggggcccaacaagcccgccccccagctgatgctaacgcatgctcaagtttgagagccacagtcctgtagtaagagtgacaagagaagcaggcattgcgggccccctggggtgtgagtgaaaggaagccaatgggcacttagccttcacccatgccacgcacctcatttacatcccctattcttatcatcttcacgaccaccttgagagccaggggttcagagcccctctttcctaatgagggctcccaggacaggatgaggtgcctgcctgaggtcacacggcagggagtgcagctccccctgccccgacctgctgagccccatcacttccgcagatcctggcattctctcagaagctgtactacgacaaggaacagacagtgagcatgaaggacaatgtcaggcccctgcagcagctggggcagcgcacggtgataaagtccggggccccgggtcggccgctgccctgggccctgcctgccctgctgggccccatgctggcctgcctgctggccggcttcctgcgatgatggctcacttctgcacgcagcctctctgttgcctcagctctccaagttccaggcttccggtccttagccttcccaggtgggactttaggcatgattaaaatatggacatatttttgg

SEQ ID NO: 737 - DNA, 31569 bp, Homo sapiens
tttcccagtattgcctcactatagaagtctggatcgcttgctacaatttgtgctatgaggcgtctcatctcaggggcacaagctggattcaagactcctccttcgacgacatagtacacactagtaaagaggcaagagttgtctgctgggaccacggttctggtaagcacaggcaaagtttccctgacgtaactagaagcaccacgtttagtaaatgcaggtgaacttctgggcctggtttggtcttcttcaatgatcagcatgtcacctgttaaaaataaaacaaatcccgatctgcaaagaaattacagaagaaaccgagtgttctctagccaagtctgtaaattacaaactgaaggagttaaagcataaactggggttactaaggagaatacagttttgcaagtaagttaccagtaagaatctttgttcactgaattttcataaagatgaaaaaagaacaaaaaacacttgaggttgcatcccaatttagtgaaggggtctggagtaaacaacttcaagcttacctaaaaagatacatttcaaaaacaaaatttcctttccttatacagtattttacagaaggtgctcactacagagtaggccgctagggggttctccttctccggaaacttatctactctagagtgtttacaacatccttgatacagcaactgaaagcttttaattataaacactgatgttcaagttttgatatggcacagaaataactgctgctggttagaaattgaaagagctttcagtgggtgttttaaaagctaactcgaaaatgagtatgcctgtcaaacgaagtatctacgaaggggactgcaaaaatgaatcaagaaaaaaaaaatcctgcacccttgagatctcatcggtgatatagggaaaaagagacataaggacagagaaaataggccctactttatatttttgtggacgccgagggaaaacaaaatgggatagtttcaaagccgaccagaaagcggaatggggaagggggtcttcaaggctttgggttccctttcaaccctgtgtcaagacaaggagttgctagacacttgccctggcccccgtcagcattctctgttctttgatctatcctcgcccctggcctcaaagcccccccgccgactcacagccaccttgccttgactggtgttttgttctctctcacgcccctctccatcctcccgggactttccctggccccagccctgattccttaccagattggatgggcaagtcttccagaatggtatccccattgctgagatccaggcactcgggagggtatccgacgaggattcgctgaccgccgggggcgatcccggtgatggcggcaatttggccctggagttcccgcacccgggtccggctggacagcccctgcaaaacatgggtgccgtccttggccttgcagcggagccgccacatcgtgtcggtccggctgcccacaggccaggcacccgcggggccagctttggtcccggcagcctgttgggagacgccgccggggaaaccaggcgccgggtggactccaaaatggcgacctttagcggggccaaacatcgcgagaagttgcgggtggttgcagttatcgcgacgcttcggtgcggcttctgccttagtaccttagcaagcgcgaactcttttaaagtgacaactgatttttcccccaccctcagaacgaagatgtaaacctccgtattcctaaaggacaacgggtcttgctacctatagagcgagtgaggtgccctccgcgtgggtagcatatatgctcaagaaaagagggcgggggaaggagttcctgaatgaaggtctggagattggaatgtgaccttgcacttagtgaggtcggaaattattaaattggggcttccacactacacccagactacaccaggagaaacagaatcatagttcacaacgcaaacgaatgccaggaatggtcagtgagtcaaaggaccagtcaaaaacaatcacacttgtgactagactcgtggctgcattaaacattgactcattggggttccaggggccaaaagactggcctttctgcctccctgggactgtgcttgaaaacgtctatttgccacttcagaaagcacagtatgaggtcagcatctgggcccagggcagctgcctcattcaggtggtggcagtgtaaggaggagtcgtgtaacgcgtgtcatcagattccagttcagttcctgggcatacaaatatgaagacttcattcctgccttcattgtaacaagtattcattgcagttgggagacagggtggggtgtgagacacacagccactgaatttcaaagcaacgtgataatgctagattatctgtaccttttcaaacgtgtatgcctagaacccaggactgtgcctcgcaaataaaaagtgttcaacaaatactggctgaatgaataaagacagagttgtatagacatagagagggcaactagagcactctgggagttgtaaaaagccttaaagaggagataactgtttgaacttttggaagaattagtttaattcccaggcgaaggaggaataaagacatccctgaatttatatctctcttttccaagaaatccatactcattgttctttatccagccgggattcagacagcaagtcccacttgccaagagtgggtttatcaagcatcaaacgggcccgctggggcaactatgaaaagtgtagttcacttggtgcaaactcacctccactgtaaaagactttgcttctgaataaattatatgtaatgtttccatcttttcacatctttcatgactcaatttttttttgctggtgcaattttcctccttggttcttcaagacgactgcaacggatgatacagcctgggttagggggtaggtaggagggaaggtaggagtggttagaagtccaccggggtggccgggcgcagtggctcacacctgtaatcccagcactttgggaggccgaggcgggtgaatcacccgaggtcagaagttcgagaccagcctcatcaatatggagaaaccccgtctctactaaaaatacaaaattagctgggcgtggtggtccatgcctttaattctagatactgggaggcaggagaatcgcttgaacacgggaggcaaaagttgcggtgccaaggtcgtgccattgcactccagcctgggcaacaagagcaaaactccatctcaaaaaacaaaaaccaaaccaaaccaaaacaaaaaaaactccaatggggtgtatgggtgggtccagggaagcttctggttcaacgatgagagtggttgattttcttaggtcacagcgtctgacctgtggagccgggtatgtatacaccctaaggcataattagctcaagtgttgtggtagtttattctagcaaaaacatctttaaagcttacgttcccatttatggatctaatgaggttctgctgggattcaggaatgagagcgttaatctttgcagcattttctcgtcacccggcacacccgctctcaagacgcctaccgaatagtctactctcgcgagagtcagaaaaaagtcaagctttttattaacaccgcccccagccctattagttaccaagcaacagtgccaccaggctcctcggcgctgggaaactcaggagcttgtgatctctctggttccgacttccagccgccttcccgagccagttaggcgattgcgaccctgccccgccccctgggtcctgcaggcgcccgattggtggatgattctctccaggtgaggacctacgcgcgagggggcggggccagacgggctcacatgatttgccggcgactgtagcgccggtcccggccacaagctgtcggctcggttcggtcgcgttacagggcaggcgccggggccaaggcagggagggatcttaggagagatcgtagggtgagccacagctgcgcagccccgggtagggtctagcggggcgggatgtgggggctgcgtgcccccggatgaagtgcggggagaggtgctggtccccaggcatggcaggcagcgcggacgttctgggaccgggagccacagtctgtgtttgggttggaggatttgtgtggtcagtaaaggaatcgtgtaaggctcttgaaggcgcaggatcttccgtcctcaccagccccctgttgtctgaattgggggcatgagctcaggactttcccactccagtttgaatcagggcttacccctcttcctgaggtgaccttggggaagtcatttaccacctcagcgctccggcgttctttagactgagtcccgggggtaactagggagagggtgcggagcagggcttgagaatgcactagaggagaaatgacgacgtgctagggctgtcttggggtccagttactgtttttccttcagggaatatgttcgagattttcccacgtccctcacttttttcttttctttctttctttttcatttttcattttttttttttttttttttgacagagtctcgctctgtcgctaggctggagtgcagtggcgggatcttggctcactgcaacctccgcctcccgggttcaagcgattctcctgcctcagcctcccgagtagctgggactacaggcgcgcaccaccaggcccggctaatttttgtatttttagtagagacgaggtttcaccatgttggccaggatggtctctatctcttgacctcttgatccgcccgcctcagcctccccaagtgttggaattccaggagtgagccaccgtgcccggcctcactgtttgcaaaactgagtcctaccgttagattggagttaatttcctggtaatgtacttcgtctatacataacccaccccaccccaactgctgccactactctgcccagattcttaaaactagaatctgaggtcatgaaaccttgagcaggacacttaattcgatgaatctcaaattttcaatctgtaaaatgagaagaaataatggtggcaaaatctgcctaattacaagattattgttaggactgaagaagataacgtctgtaaatgtagactcgtaagtcagaagataaatgtaaggttctagtgcaactctttttataggtgaggaaacagagggctagagaagtagctgctaactgggagaaacaggactgaacctgcctcttggcccagggtgtttttacttataccacacggatccaatgcactgactttttttaagttatgtcttctttcttccccttcccttttttacattctacttctctgtttcagacatctgaagagctgccatgtctggggcatcttcctcagaacagaacaacaacagctatgaaaccaaaaccccaaatcttcgaatgtcagagaagaaatgttgtgagttctggcagagaggagggactgctctctctcagcattttatcttgggaatatagttataatcctggactctgctgcttggtgggagtgataaataattatttgacatggaaatttaatgcaaagtctccagggtagaatgtcctgtctaaaacaagtagacttagtgaaatgtctgttcttggggcttgactactggtgtagtccagcagtttcttactgctttcttaaactgaatctctgtctcctgggatgtttgcacactggcttgctgatggaagttagaactaacattattgtacacacaatgagtaaggcacagttgcaggtgcaggaattacttggagctggtaatgttaccagctttatctgttgggctaagttttgggagagtgctgctcattgtagaaattgcagatgggagccagtgctgcttggtttccttcctacaggcctgaggggaatgagccctgacacttggcttctcacagtgtcttgggcatcttactttctcacaggtttagcctttgtactttgtaaactattttccctataggttcatttttttgaggacagctttcacatgagcattttcatttctatgcctgtcttttagatagaaacagcaggagggtttgcgaggagatgaagcatcatttcctgtccccaagcatctgtatttctaagcatcataggctgcatagcttcccaaaagatctgggactctgttccccacatattttggggaacttcaaggaatgctaactcttgcctctgcttctggatggcaccattcctgcagaatcctgtcagtcagttcttctcacttcagtggttatatatatatatatatatatagccagttagtcaaggaatatatatatctcagcaggtggaaacagccgaccagcatgagaccaggaattatctcatgttcaaagcttttcccagagcctcgaccttgatgtcatgcccttgtcagtttcatgattgacaatgataatctctcttcacctagcacccatggagcctgctggacagaagcagctggctggatgtgatactggggttggcagagttagggtctacaattagggtctcttttctctgccagggcaagaagccaggtgctaagggcagaataccccatgagagataactagtatagcatgatgtttgagtatagcctctggagtcagactgcctgagtttgaatcccgggtttatgacttcttagctcttgaacaagttgcttgttctctccatgcctcagtttactccttttaaaagtgggaatactaacagtgtctcccccaagagtgatgtgaggattaaatgactaaatgtaggaaggcgcttagaagagtgttgggcatatatctaatgtgtgttatttttcacaggtgactcaatctgcctgttgtatttattcctgaaatgtttatattgaatcatactcaaatgctgtattggaagctcactatttaaaagagggctgtgaataattattttttcagtaaaaaatgttttcttctcttatttgacaatattgtaacccagatttggggatctaggatgcacctcttacagggaggtacactaatgttactagggtgcttgatccaaaagagagctggggctggggggcaggatcgataattgtgggagtctctgactacacgatgccatgtgtcagtccttctagctttgcttttttctccatggtaggaatctcttctacctgctttcctaactcttctgtagttcctttgccttgagggctttcaagtcagggaagcagtaatccctggtttctttcctgtcttctagactctaattcctgctctgggctctaatctctttttttccatactctagtttctctaaatgcctttttcttctctaagaagaagaaggtgtcctaaagccactgtgatttatttaccctattctctcctcacgtcacagtcgggctgtgagactgttgcagacatagtcaaaggagaaaataaagttatgagtatatgtgttaacttacttccttttcctctgctatagagctgtactttggagctggttcacctggcagcttagtgttcacatcagcggctgctttattaatagcttaaccgttgttcccttgctgctcattacacctgtgttggctaactttgactccgggaagtgactgggcttgaggatttcagggctgaagaatgactttagggagccaaaacctccgaaggagcattactgggacttcaactgctccagggatggggcgaagaggggctactggccgaggtgcctttacggtgctcagaggactggtttcagggcttatgaaagcagaaatggagggccgggtgtggtggctcacgcctgtaatcccagcactttgggaggccgaggagggtggatcatgaggtcaggagatcaagaccatcctggctaacatggtgaaaccccgtctctactaaaaatacaaaaaaactacaaaaaaaaaaaaaaaaaaaaaaaaaactagccgggcatggtggcgggcgcctgtagtcccagctactcgggaagctgaggcaggagaatggcttgaacccgggaggcggagcttgcagtgagccgagatcgcgccactgcactacagcctgggtgacaaagtgagactccatctcagggggaaaaaaaaaaagcagaaatggagaaatctacatgctttttttttttctttttaatttttttttttgagtagttctggaacagacaaattcttccatgtacctttccctaaatacaaaagcaatgtatgttcataaaaaattcaaactacagaaaggatttagaaagcgaaaagtaaaagactcctgtttcttccaaatttgattcttttagacatcttattctggtatatcctattaataaaggtaggttcatattgttcatattctgttcagctgccatttccttttttatttttttaaataagttactgtcttgtggacatccttttaatgttgataaatgcagatttacctcattctgcattgtatggatatgccagctttccacggataggtatttaaattgtttccagtttttcatcatcacaaagagtgctgcagtgaccattcttacacgtacacctttgcacatttgtgacagcaacttttcctacagaaataatagaaaagatagacacattggaaatgttcatcagtattactaatttgctctcctaagaagttctatattgtaagctgttttcaatattttaagatatttgatggaaattgggcagcatcaactatagccatagtggttaactgaaacatcagctttcttagtgtttgaccgtagttatacgaacttggttatttcatgcctgtcaactggcaggagataatcagcagttctgacttctgatgaataaagataaaatgtcactaatgaaacatgctttatgggcagcatatttctaaatattaggcctctttagagccaataaaagaagacgtcctgggtcctgaaaaggctgggaaccattgctctcctagaccatccttcaggattagaatggagagcaagttgtgtttaccgtgagggaacctttgtcaagtgctgacatgaggcacaggagctggcagctgggactgaatgggcagtcatgagatcaggagactggtcagaaccctgaccttgactgtctattgtgggaccatgggcaaagctcttaatttctccaggcttgagtttttccatttacacgagggaagttatcaagtcctcattttttttgtaaatcttttttttaaaatacatttatttatttattttgagaccgggttatgagactggctaatttttatatttttagtagagatagtgtttcaccatgttgccaaggctggtctcaaactcctgggttcaggcgatccacccaacttggcctcccaaagtgaggattacaggcataagccactgcgcccagcctcaagtcttcattttatctaagcaagtttatgaaaggaaaatgagtttaagtttaagaaaaggagttgaacctggcttaaagaaggtggaagagaatttcaggattgaaacagttttccattgtctatcaagagatgggttacattgtctctgaaattaatcaggtggcagtggcaggtggttttgttttttaacaggcaggacagaatgttcctacttttgccagtgtggtaatttgagataggaagtgtggtttagttttgtactccagaaaatgagaagccctggttgtagcaggtgtgcttaagtgtattctggacagaggcgagaggtgcgttgctggagggctcttgggaggtcccagtggatgcagttttttgttgttgttgttcttagcattctctgtccacatgggtaaacaagagcagctggttccctggttgccttcagagcagctcccaagtatcagttcattttaaactttagggagggtaataggaccttcgggggaagtgcctaatgggctggaaggtgcggacaaagcaggcctagaagtgcaggtaatgagccaaatcatgggggattgagagcaggcattgagccgagctggagaaagtgaagactcaggggattttactacttaaacctgagacagctgatcccatgcagaggctatctgcttgttaggggccagtgatcagggattaatgccagctgaggcttcagggtacagtttgcttgcctttaagctccctatttgaacacagatgaaaatcacttatgttgctcctttacctaccttggaggggctcctgctgagactcaggaattttccatgtgtgcagtgggtaaaggactaaaagccaagccctctgaccccaggtctgggcctccatttctccctcctcaccactagggtcactctgagtacttcttgccaaacacccttaggaaacttttccttccgagggtggttctctacctgggcccctcctcccacttctccattgagatctttctacatttatttctcaaaaaatgaaagtcatatttcccatccaagtacctccattttacagaactgtttcttaatcttacaaggtcccttagtaccaggcagaggggcagccgcaacttgcagggcaccttctgggaagcagtggtgggaagtgggaggtgaaggtgtttcttcctttttcccccatcctgtgcagggccttccctcattggagccggcagagcctgagctatcccagatgacctcagtgtggtttttggccccgggacagtggctggcagcagttcaggtccttctcccacctctcctctgcagcaagatgggccgggaggagccagcccctgtgagcaaagtgatgaggaacctctttttatggagaaaagctgcaaggaagcacaagatctgtgttctagtgccagctgtacccttgactcattatgtgtccctagacaagtcacctgtcccctgaacatgtagtttgccctgcctgtccagtgagacttatctctgcaaatgagcattcctgaagtaagttaatttactaaggaagggtagactgaggactgttaatgcttctcaattgtcttgcttttacgtgggccatggtggcagattggccctgatgccctttgtgggctggctctaccctgaagcttcctgaggtctattcagaatgtgtatcaagtaagctttgccaactcaatctcactatggtttagaaattctggcttaaagaggagctcatgacctgagtgaaaaggccaaaacagcttgaggcagggctttttgcagtgggcaagctaattcttgcccatggttctgaagggatgagtgggatcctggagacagaaactctgttggacctattataggagccagctcagttctgcactggtagaatctccaagcattagaccttccttcacagctctgtcatttttatatttctaggcattcttatgttaaggatgatgtcattgttacttttctttctttctttctttttttgagacgaagtcttgctctgtcgcccaggctggagtgcagtgacgggatcatggctcactgcaaccttgaactcctgagctcaagcaatcctcctgagtagctgggactataggtgcacactcccacatctggctaagttaaatatatatatctatatatctatatatctatatatatctatatcttaaatattatatatttaagatatatataaatatcttaaatatatatattttatatatatctttatatatatctttatatatctttatatatatctttatatatatctatatatctttatatatatctttatatatatctttatatatatttatatatatctttatatatatatatatatatatatatatatatatatattttaagagacaagggtctctctatgttgcccaggcttatcttgaactcctggcctcaagtgatcctcccacctcattctcccaaattgatgggattacaggcatgagctgtcatgtctggctgcagcatggttattttctttcttagccttgctacttttttcctctttccaccttgggtactgcagtgaagacctcagacatgtgggaaagacgtatcttggtttgggcattttctggaagcctgcataaccttttaactctatttcaggaggcctgcctgatatctccttatttgtcttcccagacttgctgaacctttgctccacaggtttatgaagataaaatgagattatgactatgaagttcgtagctcagtgtataaaccttactagaccccagcggggctgggcgcctcacgcctgtaatcccagcactttgggaggctgaggtgggtggatcatgaggtcaagaaattgagaccatcctggccaacatggtgaaaccccatctctactgaaaatacaaaaattagctgggcatggtggagggcgcctgtagtcccaggtattcggaaggctgaggcgggagaatcacttgaacctgggaggcggaggttgcaatgagctgagatcacgccactgtactccagcctggtgacagagtgagactccgtctcaaaaaaacaaacaccaaaaaaccttactaggactctagtcatttcgttttattttgtttcatttccttctagcatgggcctcctacatgaccaactccccgactctgatcgttatgattggtttgccagcccggggtaaaacctacgtgtccaagaaactaacacgctacctcaactggattggagtccccaccaaaggtaagtgtggctcattccctaggaaagacaattattagttcctgggcctcacaggtctctgggagacttattcttcctggcatcaatgctatagggtgcttttggcagaaatagcagttgctttctggtttactggagttattctctattcccagacttgtctcctcctggcgtgggtggattggcctagttttgagggaatgcctttgataggactgttaagatttagatgagcatagggctgtaccttttcagaagccttacatggacatcatcttatataaccctagcagtgtctctgtgaaatagacagagtggctgaggaaattgaaacctcagacagcttaagacttgtccaaggtctagaaagtcagggcttgaacccaactcttttgactcttaatctgatattgttcccaacctaccatgctgccgcttttttcatccccttggtcactccgacattaggccaagaaacaagtcccatttggtggggccatcatattattttgctgctgaaggatttgggtgtcttctacagtgtttaatcttggggtgtatcggcgtgaagcagtcaagtcctataagtcctacgacttctttcggcatgacaatgaggaggccatgaagatccgcaagtgagtcttgtttaaggcctgatctccaggtcagctctttcttggccgtcatgagacttggtgtgacagggcttggtttcatctcagtaaatatcttaaggggaagttaaatggaagttatctgatgggcaagtgaccttgggcttgggtggtcagaagaacagggctcagggtgattgatacctgtgtgcttgtaggagaagtctaaagagggctaagatctgtgcattggggcaggggcaggaaggggttataggatggtgtgaaaaccctcagtgagaaagttgaaagatctagttagagaaaggttttgaacagtgggaaactaagtgggcagggatgtgacttctgtagccacccgaatgtttgtgtctctgactgtttgagcttagctctccttgctggtttcatttgctcttatggcagacagtgtgctctggtggcgctggaagatgttaaggcgtatctcactgaggagaatggtcagattgcggtaagctttatctgctgcttcttctttctggtccccacccttgcagcagcctggctacccagccccaccttgagtctgccctggtggggttctgtttctctgttcctgctcatttaccttgtgtactttcttcacaggtgtttgatgccaccaatacaacccgggagaggagggacatgattttgaactttgctgaacagaattccttcaaggtaggatctgactccatgttggaggaaaagggatgagtagaggtggggagtcaggctacaggcatggatctctcactctagtgggtgaggacaggatgggatatctgaatctcttctctcagagcattcccccagtccttgagtgttttcattcaggtcctttctcagactgttagcctgtatgtttgaggcccaggggctgtggtaagagctatgaggaggacttgagggccactttcatgaagaaaatcctgggagatgtggtggctgggtggggtagatgagcatgtgctcttaattaacagcctggcatttttgacttgcttatcactgccttctctccatggccaggtattctttgtggaatccgtctgtgatgatcctgatgtcattgctgccaatattctggttggtgacacccctacatatcatctcctcttcaccttttgtgctgtgtgtgttgtggggtgtgtgtgtgtgtgtgtgtgtgtgtgttgttggggaggggtgttttcgtaatgaaagagagaaatagacatgtttaacatcacaaagagatcttttctatctgccagagccccatctggtacttctacactcttctcttgggagaggaaactgaggctttaaggaatcaagtaagaattagctgttgaattgaaaccagggtttaggttgtaggattcttggccctgtgctctaggtattatctggatgttgagacctagatgttggaatagatcagccgggcacggtggctcatgcttgtaggctcagcactttgggaggccgaggcaagtggattgcttgaacccagaaggatcaccttagcctgggaggttgaggccacagtgagccgtgattgtgccactgcagtccagtcttggtgacagagtgagaacatgtccagggaggttgaggctgcagtgagccatgattgtgccactgcagtccagtcttggtaacagagtgagaacatgtctcaaaaaagaaaaaaaaaaaagaatagatcagactcttcgtttcaggacttacctacaggaaggttatctccccagcaattgtccaaagttctcgtcagtgttctatacattgagctccttattccctgtggggtcacaatgtaagccagtccccattggatgggttgtgctctgctggaccgagtagatatctgaacatggtcttatgcaggtgctctcccagccgtaggaacttgggatcatctgaggaagagccatctggtcccaagtcaggcactggggtcatgcaccctattctgagtggtaatagggaaacattggagcctgttctgttttctcaggaaagtacataaagggattggggcccaggagcagctttggctgcgtgactgcctctgtccttcagccaagtgcaggcacatgactccccagttgtcttaacttttttggttgccagggtcacaggacggggcggggcggggcggggggtactcaatgagtggagtgccaatgttccagtgaaaggcgacatttatggacttctttttcttttttttagcagtggctatttgtaggaggactgttacgggcagacctctgatgaggcctttactggttcctatgatttcaggaggttaaggtatcaagccctgactatcctgaaaggaacagagagaacgtgatggaggacttcctgaagagaattgaatgctacaaagttacctaccgacctcttgacccagacaactatgacaagtaaggtttaaggccatggtttgaagggcccaaggcaaaggtctcatctgggaaaataacctttctccctgagttctctaacttccttctgataatctagatctacagtgttaacatcatcccagagaaataaggtatggatttgtggcttttatgtggattgcatcttgtacatgaaaaattgaagtggttggttttgttttgttttgagacagggtctcactctgtcacccaggctggagtgcagtggcaaaatcagggcccactgcaactgctgcccccggggctcaggtgatcctcccacctcagcctcctgagtagctgggaccacaggtgtgcgccaccatgcccggctatttttttttttttttagtaaagatagagtttccccatgttggccaggctggtcttgaactcctgagctcaagtaatccacccgcctcggcctcccaaagtgctgggattacaggtatgagtcactgcgcctggctggaagtgttttttatcatcaattttttctctccagtctctagagcatgatttcctcaatctcagtattattggcactttgaactgggtaattctttgttgtaggacctgtcctgtgcattgtaggatgttcagcagcttccctgggctttgcccactagatgccagtaacacctccaacctgtgacaaccaaaatgtctccagacatgtcagaggttccccggggggcacagttatccctggttgagaatcactgctccatatctgaatgggggtgttgtaggataccctttggagatgtgtcatcagtttttaaagtttatatatattatatgatattttacatatattaatgcttgtgtgtatatcatgcatattatagcataacatatatattacatattgcatatttttatatctatctctctctatatataacatgcaaagccctcaagaacatgcctgactcagagaaatgtctgatcaatgccagctgttgttactatggaagcatttgttggcagtatggtgtagactatagattaacttgtcatgtgtgaggtatatgagccataacaaaaccaagtctatgttgaagaaagatggtgtacacatggaaatctgcaagaatgtggcctcatgaaagagcatgcattcagggcagttaacagctctattcacataatacagacctgcagccaagcaaatggcacatttaatgtgcatggcacacttaatacagtggtctgtttaatgttttgagcctttcagttccttcaagtgggtttcccagaatccccttaattcagaggctgaaaaccacctctagatatggcataaaagtattcttcagttggaacaaagtcccacctagaaaaacatacagaagatctacatatatatacatgtgtatgtttgtatatgttatctctggtagtagggtgatgcgtgatttgcatccttccatcattttttctgattttttgatttaaaataagcacttatgactttttttttgagatggagtctctcgctcttgttgcccaggctggagtgcagtggcacgatctcggctcactgcaacctcccccttcctgggttcaagcaattctcctgcctcagcctcctgagtagctgggattacaggcacccgccaccacgcccggctaatttttttatttttagtagagatggggattcaccatgttggccaggctgttctcaaactcctgatctcctgatctacccaccttggcctcccaaagtgctaggattacaggcatgagctaccgcatccagccacacttatgacttttataaagagaacaatctcatgttggcctcaaagcaagcaatgtctgaaagtgtctttgagagaagcatgattaggtagatgcagggagtatatagacatttctgtctgtgcttctgctgcctcttcccttcccctcgttgctcgtcgtgccatattctggccaggtcttaactgcctcaaaaggggcctattcttctcaccaaattttgggcttagcaaaatcttcaggtcacctagtctagcccctgatgggaaggctgaattctgtttatcctatttatctacattacttgtcacactacaggcactgaggaaatggtacaaacttactagaagttcaggaaattgtacttcatcttggttttaaggagtaattaatctcctaccatttggttccataaacgtgggtgtgacagaggaggggaggaagagcagctgtgagcctgcaagtccctgtagaaatccttttccctctgattcttattctcagatcttcttacctagggaattttttttttcctttcctgtcccagggatctttctttcatcaaggtgataaacgtgggccagcgatttttagtcaacagagtccaggactacatccagagcaagatagtctactacctcatgaatatccacgtccagcctcgcaccatttacctttgccggcatggagaaagcgagttcaatctcttggggaagattgggggtgactctggcctctcggtgcggggaaagcaggtgagtaattattcagcacactggattttctaggcttagagttagaagggcatgactgaggtcatatattttatctccttacttaaatcccatttggacgtaggctgtggtttcatagtcaggcaagtgctcaaggtgtgttcttgctcactgcgtctagctctgtgttaaagagtagataactttgacccatttctgctgtgatcattcaaccatcagatattcattgggcacaacttgtgtacttagcaatgtacagggtgctccagttaaagttcatttccttttgggtttatattaactatgtagcaccttatggattttgaccatggttatgcacgttgtcccttacagaccaagttagcaggctttgtgtatgtgtgtgttgagtgtgtgtgtgtgtgtgtgtgtctgtgtgttttctttttacccttaattttcatttttaaaccccagtttgcccaagctctaaggaaatttctggaggaacaggaaataacagacctcaaagtgtggacaagccagttgaagaggaccatacagactgctgaatctctcggggtgccctatgagcagtggaagattctgaatgagattgatgctgtgagtaggaagctctgaaggcccagaaaagccaacaagagttcaggcaggaactctcagaagtcactatttagacagttttatctaggaaactacaaccaacaagtaaaaactctgaggaagctgactctatggccagcccgggggatcagggaggacaattgtacccctaatcaggggtttcctgcctgattcagtacctgtgccaatcatgggacccaaaccaatttttgagccagcctttctggcacctggggaaagtagggctaacaaggactcattttgttcctttgtatatttgcctcctgggaaaaataaatagctaacaacccacttctttgctttctgcttagatcatttggtcagctattcaggaaaagtttttcccaaaatttctcttggctttctctcttcttgagtacaaaagtagacatttctttctttttttttttttgtgacacggagtctcgctctgtggcccaggctggagtgcagtggcgtgatcctggctcactgcaacctctgcctcctgggttcaagcaattctctccctcagcctcccgagtagctgggattataggcacctgccaccacgcctggctaatttttgtagttttaggggagatggggtttcaccatcttggccaggctggtcttgaactcctgaccttgtgatccacccgccttggccacccaaagtgttgggattacaggcatgagccaccgtgcccggccgacatttctttttctttccttccttctacccttttatttttcatgcaaggtctccagtcccttcagtttccctccttctctgcttcctgttccttttagcctcttgactttcttgacctgtaagttccccccagtagtaggagaatgtggtagcttgagctagagaagttgcctctttccggcagtggtcctcacccggtgagtcacagacactctgtgacactctggtcacaggcagctgcaatacatgaaaggacccagcacagtgcctggcacgtactaagaaactagcattcttcaatgtcatcttccttatttgggatggggctggtgtggtacagtctatctcttcaagccagcttcaagtggctttttgcagggtgtgtgtgaagagatgacctatgcagagattgagaaacggtacccagaagagtttgcacttcgagatcaagagaagtatctgtatcgatatcctggtggggaggtaagacgcccctgtcatgtaaagtgactgcctagacccttgctgagtgtttaactttaatttgggggaaggattgaatgtgatttggagggtctaggcatcatttatcttccttcccttgggtcattttggtttcattcagcttagacaatcgaatgcctcattaattgttaagattcccagggataagggtgacaaggcatcctctgttcagtatgttttagaatcaacacaatcatttttacttctttttttccttgtactctctcaatcccacccccacataagtaagtggagtcaccaagtaaatatatgggataggaattatttccctgtcatcttgagtgttttaggctatttccttgtctaagtggcttccatactctagggatgtgtgaggcaaaagtaaataaaactgaatggcagaggtacaggaaacccctaggagtctcttgtctcactgcctgtattaatctgtgggaagaaaaaacacacacacacaggttgaactcacacttcctcttcttaacctgtagttttcttggtctaaatattgcttttgaaagatctgagttttctcaagagataccagggctgggggcagttagcaggtgatgtaaactcactgagcctccaggaggaaagccagctgaggaagaagaagtggcccttagtctccaaggtccagccactgacttggctgccagcttgcacctgggctcctgccagcctgccccatttccctccacagtcataccaggacctggtgcagcggctggagcctgtcatcatggagctggaacgtcagggcaatgtcctcgtcatctcccaccaggctgtcatgcgctgcctcctggcctacttcttggataagggcgcaggtgcctttgagggaggggctgggagacacatccagtgggagagggctggacttgcagtggcaccaggattcctgggaaacagacctccctgtctccactcaaattagagtactttctccagacagcagtgtggggctcccagcagccactgagtcaatgacttgctgagttcactctgctgctacgaaagcttccaatggagagtggctgctgctggtgctccttgatcctgcctggctcaagggccagtgtcatgctgacactcctggcagcatcaggacagtggttgaatattcccagcctgccacgctgcctactaggagggtggtatcttaggagcagcagttgtttctgggtaagggcagtaagaaggtgccgttgccttcttccatacttcgcttcccgatcttcgggagctcctgggaagcctgcattgtggatgctgagctcagcatcctgagctgcttggaagctgttgtggtcagaccttattggcctttgctgtacccaggtgacccccttccattgggctctctggctacaatacttcctgtttttgcctgcgtggaaggatctaagatggccttatttccttccttagccactcagaaggttgggtggctttgtggtctggggtttaagggaggagttgtacaactctaagaggtggtcaaagtaagggaaactcattatgagctctgtagattctttcttccactaacttgaccttactccataatactaagagacttccctcgcctggtctttctgttttcagatgagctaccatacttgagatgccctctccataccatcttcaaacttactcctgtggcctatggtaactatgcacataggggctggcaggagctgggaattgaggaaggtcagaattttctctgaagtttgtctagagttcagcttcattatccctatataccagggaagctccatcagtgccttctgttttgaaagggatgtatgcatgactgtgtgtattgcagaatgcgtacattcctttgtggtatactttcccataactaaggaattttccattgaacctttttctttaagtcctctctttcctctgttttctcagggtgcaaagtggaaacaattaaacttaacgtggaggctgtgaacacgcaccgtgacaagccaactgtaagtattttcccacgatgaacacaccagtttccctgccaccttgagtctctgaagctttgacatcaagagactggggtttcttttatgtacaaaagggaaacagattcagaacttacgtccaaatgtagtttgctacgtctgaaactgatgttggaattattttttttttaaattagtacccctttcatgagtcttaaccttgaatgttggctcctggaaatccaattaaatatggaaagtgtttggctgaagtgaaatgcaaattactacccccctccaaccccaagtgtccctttagaaagcagagtccagaggagcctataaggtgggggtcaagaggtgtaggtttgttcctaggtctgtcactggtaatctgtgtggtcttcaataagccccttcctttctttgggtctttttcctgctttggaatgttatgctcaaggagcttctcccttttagccccctgatgctaggaggccaggccatgggccatgccctgtgagggaccctgtgtgcagaggagcaggagtgagggaagctgttgtggttacaagcgcattattaacctgtatgagtgagcttttggcttggctttcatttgtgtggtgtcactccatttccaatcagaacaacttccccaagaaccaaacccctgtaaggatgagaaggaacagctttacgcctctgtccagttcgaatacaataaggcgtccaagaaattacagtgttgggagccggcccctcaagcccctcagccctctccgtgcccaggacatgcaagaaggggccgactagccgaagacccaagtcagcattccggtggtgtaactgtgtgtttccctccagccctggcctcctgcccttgtcactaatcaccaaggagtcattaacttcctccctctatgcccacccctgacacttcaccattaatcttaacacagaacatgaggttatgtgtttataggacaacttaagctgttcttcagtttgaaacatcttttcacccaggggcaagttagcaaattgagtcttttaggacagattctcagatgggatgatctggaggaggaggaaaaagatacactcccttggggctgagcatgccccacactcttggatcttctctctgttccctggtgtcttcactaatgtcctcatgttggtgaagtgttgggggatggagggcgggtgagcagtcgggggacaaaaagtctatttttccttcacttttgtctcttcaatgtgtgttttcctcacactccttacttgactgctttcttcccccactttcatgtcccctctggattgtccagtgtaatgcatggcattgtggtgtctgtctaggaaggaaggggtgattgacaagagacaagtctggcccagttaatgctttctgcagtgggtctaaatggatctggactggaggagtctttcctttcctttctcccttcctctccagccaggtcctgtaagggccagcccagactacaggacatccacagaatattctggagcttgcaagtagacatagggtgagagttcttgcctcctttcatgagaaacagttctaagtcttcgatgccctgggagaatctggctctgagcatgtgggaaatgtcttggtttttatttttaatttagagtcaggcctgggtcttttgaggtctgcagagtggggtttaggagagtagggtgggctctagctcttgcagggctcttagagagcagtcatgtcttttctcccatgactctcaggttctttgccaatcacagcaacttttcctgccaaagccagtatcctctggggctgtttagaagggcagttagattcaggagtcaccactgatgtttgagttgctcaaggcaagaggcagagaagagttcactaaaactgcttatttttgaataatttcagcacactgtccttaagaagaaagaaacatcaaaacaaaatagtttttacatgaccatttttttcccaaatgtggaaaagcttgatgatgaatttaatctctctcattggagtattcttttgttcataaagagaaactatctcatcttgatgtccagagaagtccttggaaccctgtgggatctagctcgtaactgtttgtatttctctattcacttctgtcatttcattttctttgtagggttaaacagaaaatgtttagggaagaaattcttagccccttgatgaccatgatggcttattctctttcccaattttgcatgcaaaatgtacgaatatatgtatgtttttctgagaggcaagtttagggttctcatgggattttaaaaagagataggtgactccccaccttaaagttatctgctggtcttttagaggtaaccagtgagaaggagttagctattttccaagggtgttttcatttggtaatggaagactttttgctgtggttctcatccaggagtattccttagaattgcctttaggattgttgaatcataaacatgcctgtgtccaccttatgcttaatactgactcagaatctctgggatctgggtctggacatgcatgtatttaagtagcttcccggatgattctgattcatagctcgggttaagaactccaccttaggaagttaggtggaaaaatactggatagtagtttctcagacaaaagtgtcagcctaggaattctgaattcctcatagtcctgaaaggacagttctttgggtttgatgtttgagcagatcataatgttaaatgatataaccccctggaaggcaggctgctgtgttttagagggttattctaggttctagtcccatctttaaccctttacattgctgagtgatgtggaacaaatcactgaattaaataattgtctctagagagcagctggggattttaagcaccctggagagaggtgcagaccctgccaggatgataaaggttgtcatcactggcaactgactcctgaccccgggtcctttactcgtatgtcccaagtaggataccataggcagcttctaaaggctgcttacctagattcttctcaaaattgtgtccaagatgttaagtaacctgctattcctgtttagtggttacataacatgtacttagtgtctttgtggagctttgggctggtaggggcagggataggggaaagctaaacagaagtagaagaaaaggtccttgtccagaggaaggttattttaagagacaggacatgtaatttataacaaatggacatttgcaatatagcaacagtctgagtctagaagtgttcaaccatcacatcgcttctcctgacttttctgttgtcctatggctatgagactacaggggttgggggatggggatgcccccaccaccaccagtgtgagaatgagatatggttggggaggcgtgtttggcacttttacaaggttgcattgtccacatttgcttggatggtggcatctgtagcccaaatgggcattcagtcttttcttctgctgtgaggtaagagtaattcagacctaatgaatgagaagagggagcactttgatccacagactttggattaacactgtacccactcttagcaaaaggggacttctctaacaagctagcattgtgttaacctgtcattaacccagcattagagacaggtcactgggatgttcattctggctctcagcctgctgttatttccccactctcacctgtgctagttcgctttctccagaagaggagctgaggtggtcttatcctcagataggacatgagaaattggaatttggcaagcaagggcttcagcatcctttagtttctaaagcaagatcccttcagagaagtctagcaggaagaagccaggagaatgtagaatggaaaagagctcttactccaaattttagagaagtttcagctctacttctcatcttttctctcctggtcttacttgaatgcatgttggtaatctgtatacattactatgactgtgtctatcacaagtcctacaaaataaaaatggacttaaaagtactctctgctgaggctgtaagttttgttttgtgagaaataggtaaagacattagcatttaatctactggaataagctggttgctgtggcttatacctgtagtcccagatacttgggaggctgaggcaggagaatcacttgagaccagcctgggcaatatagtgagacctcacctctaaaaaagttttttataaatttacttgtctaaagtggggaaagggaaattattctgttttcttattcttgcttcaagactatgacagatttgaaagagaattctaaagcagatttagagaacctgcttctcttcttatctcctaatccctaaattgtaatttagctcttatctgtattgttgttttgttttggtaaagggatgatttttacattgagttttaaagtagaataagaaaagcttctaaaaacttgcattgtgctagggatctgccctatatctttgcctctggtgtttcgttgttgttgttattgtttgtttgtttccaaagaagttggagttaaggacacaatatatttgtacccctagactgaatgggtgagtattccatatgaggatctgggtaatcctctttgcaacccacatttggtcttcagagacactggcattttgaagaaacatatgatatagctgtttggaaataaattcatctatgttactttttttttcttttttttttttttttatgagcaggagatcttaattgacagaaactcattggtggttggagtggccaatgggcacgggaaaaagtatccagtaatcagaagaattgtatctgggttatgtaatcttatgcacattccattgtctttgccaagcccagaagccatgttgtgttcattgttaagaaatttgatagatttacccagcttttctatgtattttgacttattgaaaatatgtaacaactgagtcgggttgcagcactggtggggtagaatcgactttccctgaaggtgacacagatgtcagaattgtgtccagggatttaatttagacccatactgtccaggagactgtctctagttggatctctgtgctgactgactgacagacagactttagtgtctgtgtgctgactgacagactctagtagtgtctatatgttgaccaactggtagaccaggaggatctgtgtgctgattgactctagtaggatctgtttgtcactgacagactgtagtagtgtctgtgtgctgactgatagatagactatagtaaaatttgggtgttgcctgactaacggtctagggtctgtaagctgacagtctgcctgctttctgattgtatccattgaagtgtatgtacattatggtaattctctgtctattaaatgtgtctaacaaaggaaggaattaagcactccacgtgttttctttataggggagttctgtacactatgattttaaatagatatttcttatatagtagtggccaaattctcattattttgtacaagataaaggttatgcatcacttttatggtattttgtgaactcagctaagggaatgcctgttcagagcctggagttgttacctttacttgaagtcatctcatccagtcccctgctttagggcaggacttcagttccactgttcatttctgaagcttctgtgtccccagcttaccctgttctgaaatgttgtattccattggacagggctgctatttttagtcagccatgcatttggattttacacttaatctagtaagtaaaaatgagaagaaaatttggcatttaaaaattgattttaagggttggcaaaagtattttttccagtaagcctttcactggatatctgtgaccaatgtttacctacgcaatgtttttgtatctgaattgcttatgtacgttttttattatattgacctaacaagaagatcaacttatgctggtatggtgatggttttgctatggcaaaatcaaagggctgatcatacatggtgccctttgggaagggggatggtgtggggctgagcacctctgggttgaatgggaatgggtcagattgggaagcctaggaagagagttctactgtagatttcctaggcactgctctgttgaaataggaacataagtctttagcaacattctgatttaatcgggtgacactgataacaaagtatgccactcagatccatttaaagtgtgcataactgtatttgaaatgtgtttttgtgtgcgtgtgtgtagaatgggtaaataaaattgttgagtaacttgaacctatcagaaggcttctgggttttttgtttagtattttcagttgtgtttcccatcccttccccacccctaaaactttgcctcatgctgcacaaggattcagactcagacaagccaacagaagttcgcactgtaattgaagaccatggtgtagccgtggctctcttctgccaccttctggggaagataggaagaacattatggaaagcacatgaacttcaatagttgtgtgttcctgttggcacttatgcaagaattaagaaacaattacatttcactgcactgtgcagtaattcccattagcaacatgtaactcatattatgtattataaagaaaacttttggagattttttagcacttggtggactgttgttcctaaaatgtgatttgcccatttctaaagagattatggtcaagggtataaaacagcatttaattttttttgagacaggaaatacagatgggattgttttaccattcgcatgccttattccttgttaccttaacaaagaccagaagctcattagaaatgcagaatcccaggccccatcccagacctccggagtcagaatcctcattttactaggacgaccaggtgattcatatgcacatttaacatttgagaagcactgttctaggggaaaaatttcccacaaggtaaaatgttagatgccagttaatgggaagaagttgatctgctctgatgactggtttcagaatggactcgtataactaaaatagtagggaccctcctcagaagccaagtagcccctgactacagtgtcactttattggcatggtcttttggctgacatagcctacacgatttccttctaccagagggatcctgactgctcctgcttcatatcttgggtatgtagcttatggtccaggtctgaaaggagtgcctggtccaatatggtcacgaggtcagctcctcagggaaagaagaccatgactacgccattcgggtagtcaaggtgtgtgtgtaggcacaccagtgtgttcatgcatgtgtatggatgtggggatggggaggttgagggaggagggaaggtaggggaaggattctgttctacttttatgttcgctgcttggcagtgctgtaatagctttgtgtctcttcctctctggctcgtaggcagcagagaccacactggctgtgcgcagacgcccctccgcagcgtccctcatgttgccttgctaatgatgtggatgttcaggcctcacctctccaaacgactgggatctactgaaaagcttgggatgtcagcttcacagaggctagaacaggaagttaagtgggaactggactttgggggccaccaaaacgaggcctggagaaacgtcaccatatttcctcccctcctgcctaatgggaatatcagttacactgaaaaatttaacttccctgtgcctcaaaacatttagcaacctgaaccagtgactttttgtcatctctgtgctgagtttggtccaagttggtcaatctcattctgtataggcatttaacatcctacctgtgactgtctgcatcctttgctggctcttttttgcccaaagtgcaaatgcacttcttcagatttacttttcaagtgagaaggtaagagctggtctctgccactgttccaggcgagcaggctagagtctaatatacttatgctagcagttaccatttgccacattggaagcaagagacaaatcaccaggtgaatggagggtcttctgagaaattcagtccctaaaacatcttctctgccttgatagaagaacagtgtcagtggcaaccttttcatttagagaagtttttcttgttccaggcccttcaggacaggatctgactgcaagactccccaaaatgggtacccatcttctaagttcccttttgtagctactgtacttttgacttgatgcatgtgcctctcatgcatcaagatggggctgatgtggttctcctgggtggttgggaatgtggactagacagaaaagtagagtgccatttatatcacgtgagtaagtcaagaaagctccttgagaatcagcccgatcagggagtgttttggcttcagaacaggtggaaggagacacgcccctctgtgggctctgtcaccatgatacagtccttgagagagctgtggctgtgacttggagggcagtagtctcctgatacctgcctcttggccactggtcactattgtggtcactgatctctcatataaaagtgagggtggcggggtcatggaccagcgcctcagtgcattagtcattcgcttttccttacagacaaatcagataactcttccccagtgattgtcaaatgtatgaatgtatctctgtaaatgtggttttgacatgtcactgttactgaaggagagtatggaatccccacaggatattatatcttgcaaggaaagtctattttttaaagaatagtatgtttttagctttacttttctttcttttccttttcactcaaatgctcacttgctgggcaaaagggtgagtagcaagaaaagtaatgatatgtagcttttctcaaatggttcttttatactgtggatgatacaggactctgttacctaagatgtgataagctgggctgcaggcggttcagcatccagcaactaggagctgcttttctacgtacaaagctgccttcaggaaggctccttaccctgtagcagatgattttcatctggctgcctaccgcatgctgtactataatgatttagttgtgatatggatttctctctgcatcgaaaactgtcttttgatgatcagacaatgtttatatttagttatttattctatccatgtaaggcatttttgagttttcttgtcactgtttgcatgtatttaatcagaatgtaatataatttatgttgtcaggtttttttttgtttgtttgtttggggttttttttgtagaaatttaggtagttagagcttttaagtctaatgtcatattaacttaagttaaatttccagaacgtagatatctgtcttctgtaaaaggaaaataacgatgttaagggacagtgaattttttttgaatactttgtttctcattgatttttattgtaagtgtaaaccaagagatgcatttctctggagaagtgtttatctcctggattaataaaatcatgctaaaatatgcgagtaatatgtattgcttttgtaataagaacataaaataaaattatttttaattaa

SEQ ID NO: 738 - DNA, 17613 bp, Homo sapiens
cccggcccgccccgccccgagcgcggggagttcacctccgcccgtcaccacctccccttgtcgcctaggtccacccgagccccctcccccgggccgcccccgagcacgaagttggcgggagcctataaaagctggtgccggcgcgacccgcggacacacagtgcaggcgcccaagccgccgccgccagatcggtgccgattcctgccctgccccgaccgccagcgcgaccatgtcccatcactgggggtacggcaaacacaacggtgagtgccggcgacggccagcgcgggggcgccccgatccccgatccccgatccccgatccccgagcccggatgccggcccggggcccgcagcgcccgcacatgctgtttaccgcggccgcggggagtgctggaggctcaggtgcgccccgggcgctcgctccgctcgcggctccgcggcgccggggatgtcccccttgccccagctgcgaggccactgtggaggaatccccgcgtccgccggaggcgcgtagggcccgagggaggggaggcgcagccctggccgcgggacccgaggacagtccctcccgggtcccgacctggggatcattttaaccggacctaggaggaggcgggaaagggttgtaacggaaaattctagttgttgatcgcagagaaattaagagactcccctcccccctcccccaccttccacccccaccccacccctccagcttcagcaccacctgtggctaaggcgctcagcacgaactgtcccggggcattttccagtgctggtttgaatccatggctctgatttccgagttttcccttcatctctcgacttctaatgttagggggtcggacatcaggaatcgggttttatcttggcctcagatctggttcttcggagccagcggagcagaggagcatgcgtctggcgcacctagcgcatctttggagggtgtggggcttcccaggtagtggggaaccctgacggttaaaggtggggtgggcccgggcctgggcagtgaggaaaggatccagacctccttgaatgtcttaagtgagcttgcatatcccaaaatcgcaaccacaagccctgacattagtgtctgcccgatttcagttgctgaatttcagtaaaacgaccttaaaatagctaatatttatatagcactcagtgatctaagagctttacatatatcgattctaattcttacagcgacatctatgaggtagatttctaattatcccatattacaaatgtggaaactgaggcacagattacgtgttttcccaaaatttagcccattgttaagtgatgcttctaaaattggaactgagcagattggctccggaatgattgctcttctctaggggtctgggtgtacctttccccacaatgggggattcacatgtcttctttcccccaggacctgagcactggcataaggacttccccattgccaagggagagcgccagtcccctgttgacatcgacactcatacagccaagtatgacccttccctgaagcccctgtctgtttcctatgatcaagcaacttccctgaggatcctcaacaatggtcatgctttcaacgtggagtttgatgactctcaggacaaagcaggtcagtgtttagaaaataacttgtgtcttttagccagtagctgttttccgagcttaatggaaggagccaggaacagtggcaggaaccctcttaataatacagtttgtctcaggactcaaggatgccaccctgatcattttcattaggtctcagattctgagaagtaggctaattagtttgaagtgtcccggggccgtttcttccctgtaaaacccttggcttctatgaaggccattgaataactgcgatatgcctgtgaaaaatcacaaaaggtgcaaagtcccctcgcaataaagatcagtcacgatgagatttgcaccaattgaacttttaagattgtaaaatattttgtcttgcagagctgatgcatatccattaaaaagtatatcttagtgagccttatcttcaagttagcagcgagaagagtaacaaaaacgtgccaatttaaaatactgaaattctgggaaaatgttttacttatgagtatttcttagtattgggctagtgtgataaagatggcagcatgttttgatatctactcagaaattcatttcacaaacgaagatgttttagagttggtgaacatacctggcccattactgacaaaaccaattaccgtatttattggtaatagagctgtttacaggatgctcactgtaaaaaaaaaaaaaaaaagaaagagaaagaagaaaaaaaatcctgcttttttttttttatctctctctcttttgaaacaagagaacaatcccattcacacatagtagctgccttctttgctaagcagttaatttaattgccagtgccctattttcctgagtgctttcctctgaaggtcatagaatgaaatggtgctgcaaacacattttgtttggtggtggtgtgggagtgaggggagtggtggaacaaaatgagaaagttttggagtagtgacctacggtactaatatattatataatatgtaattataaccatttagtcaggtagactattctttgtcagcagctatcctatatagtcaacttggttttgaaaaaagaattcttccctcctttcaactttaaaaaaatttgcaaacacctggctttctgaaatggtgattctggaagacaatttgatgggggataatgtggagatcatctgagaaatgttttcaacctacctgtgcctgtctgtgtgcacccctccccagtacacacatacatacatacatacacacacacacacacacacacacacttacaatcatactcacactttctggcatagtatgatgatttattagaatcaagtaaaggttgtacattgaaaacagttcggtgattctgctacattgctttcccaagcattcctctcactccaaaggaacagtgctcatataattaaattaaacaatttttttcttgtaaagaatactgtatatttataacaagacaaggccaaaggtctcaaggtattacacatacagaaagaatactataacatttcacgtctagtcatttacaaaccaaaagaagtgagctactttagtctgtagctgtacttttttaaagagccacaatgatgtcattgttttcaatggatgtaatgtctgccaaattatgtatctcattggatgctacatagaaattggatagtttaagtcttttttggagcactgaagaaacaaatctccaacaaatgaaagcagatgaggttcctaatagtccttaaaaaatggatagtgaaataaattattctagtaatatgtattactggaaagtggatttgaacacatggtctggtggctatcagcatagactggggtcagagagacctggatttgagttctagagctgccggcaactagctcagagactttgggagtaatactgtctaggttttaattgtttttaactgtaaagttggagtaacaatagtgtctgccacagtggaaggatgaaatgggacagtatatgtaaagcccctagcccagtgcctggcgcatagaagttgctcaataaatggcctctgttgttgtcacaacttgaacccttcgaccacctctgttagaccattgctgtagatgttgcacctgcgataagatttctgaataaactttttctttaacagctttaagattagttcccatcatttgatgtattttaaatttttatttttatattttctgaagcatactgtttatcatactgaatatgtacttattttatgtatgaagttattatatagttacatattttaccatgaatctgttaaactttgacagatttctctataagcagtaactaattagatctagctacatttttcacagctatttcttctggagagcaatgcatacatttttaaagaagttggccatgtttagattgtgaaacagatgaaaaccacagggtttcggtaggagctcccacccatgcctttagagacacatgtattatccacctagttctacaaaaaagtcattattaacaccacttaaatgcatgggaagctaagcatcatgaaagcagggtggaggcctggtccctctcctgttccccggagcccatgctggaaatatctaaagtagaaagacatagaaatagtagaccctgactgccactttgataagtgcagaaaggaagtactccaaggaactatggaaacgtgaaggaggcttggcagtttaactgataagacaggaaagactttccagggtaaataaggcttatgtggaggcttgaaggattttgatgtcttggacgagagtccaggcaaagggagataggaaataccaggagacttaagagagcacagcatgtgctccagaaaggcaagaaggtatactaaaagcaaggtcagaaaggacttgccctcctttgcatatgaaagattcctttgtaattttgcctctcttttccacattttcagttactttggttaaacaagaatgcagaatatattaaaatgtcaatattaagagaaaagacatctacagaataaatttttaaaaatcataccatgtgggggacaggcacggtggctcacgcctgtagtcccagcactttggaagactgaggtgggcggatcacttgaggtcagaagttcaagaccagcctggccaacagggtgaaacactgtctgtactaaaaatgcaaaaaatgagctaggtgttgtggcatgtgcctgtaatcccagctactcaggagactgaggcaggagaatcgctggatcccgggaggcggaggtcgcagtgagccgagaccgcaccactgcactccagcctggtgacagaacgagactccatctcaaaacaaacaaacaaacaaaaaaccacacacacacacacacaaaaccatgtggaaaaactccctttagactttctttcttttttttttttttaaataaaacaatcctaggctctcaaagccaaaacaaagaatagagatactctagttaaactcaccttaataaacatgaagaaacagaagctgaagagtttaaataacttgctaagtcgtctccttgctagtttgctggagggactaagtagcaatcacttaaaaatagaattttgaataaaaatatttgaaggataaccttatttgacatttagtttatacataccatgttttttaaaagctggcatttttttctgtacacaagtcaaaaagttatttattttagtcacttaattttaaaaaatcggcagtttaacatctctttttattaggagttatttttgtggtggtaacatttttagatttcctatacctcttatttcctgcatttaaatgcagttcatttacctgtcttctttgcctcaatgagatttcagccttctagaacttctcatagattgaggttttccaatatgctttaaatgttctcttatatccaaacttaagaacttgggtatcaggaactgagcgggttgactttattgctgatttaagcttgagagaattttttaaactacggagttaataggatttaactagaaacttgggttagagctctcatcaatcttctaaattcctttgaaaataagccaccataaattcaccttaagttaatgaaaaattgctaatccctttaggttcttaaaaaacttattaaaaaataactcaccctgcttgagatgttttattaatggccttatctgggagaaaataatagtagtcaaattattaactcctgctaacttattaacttttattaatgagtttaatactctcctgctttattgcaaagttagggacaaatattgaaagtcaatgccagaattattgggccaactcttatccaagtcttacatcatttctgtttttcagaaattggaattttttaaatctgtttgttatttcaagaaaagagtaaaggaagctggatgagtttacctgtgctctttttaagtgacccattgtctgtatgacgtaatggatcttcatacatggatcctgcttgactttcagggacttgcttttgaagctctaaaagttttctttcacagcagtcctaagttaaaagaaagcataacaacaaatgaaagggcttgtcatgcacgcagtaatggtgtcagccgaaccttaaatatctagaaaatggaccaacatattctaaacactgtagttactatattcacatcaaaacagcttctttttttactcctatataattgccacatagtttaaaccacgacttctgttgaatttcaactgtgtttactctagcgaaagtgacagctaaacatcttattgctttaaaacaaatggaatacgtgtattttttccccccagatttgtctatattggcacgtagccctaggattattggctgctgccaacaggcaaaacagtaatgcatgatttaaaatttttcaggttatttatagaaaagatggtaccgaaaatgacatgttttctgtagaattaatcttttgctttattagtaggaaatcatttaaattttatttttaaactaaagattactgggactagtttatttatattttggacttaggagaaactgttgacattcattacggtctttagtctgttactccagtgcatcttaatttagtttaagtgattagggagaaaaaattaaaaaatattaaatgttcagcttttaatttgtataagtaatgtgattcatttcaatattactggatttcttatttttctcaaaaagtaatttatataatttcctcaaataatatgtataggaagaaagattattctataacattatacttagtgcttgttttgtgttatatacagagtatgtataattgatgacaatcatgaaaattaaaattggctggagctcttggtgttgagatttgaatttaaattaaattggggggggtcttgaaaaaaacattagagtagaaaactgtatttatgtctccatccctcacagaacccatttctggggtacaatgaatcattgactctttaaagcaccactgccatggctggattttacagagaaaaaataggcagttagcaatttctgctattttttaaaattatttttacattagaaaatagatttcattttaaactgcaacagtttagaaaatggcatgtagtcatttaaataaataagtagatccagaatatagcataaagtccctaacttaaaccaagatattatgttttatgtttctcaaataaaaagtttgagtttatggcaatttattataacaatgtttttgaaggacttcattgactaaactccatgctaagagtttgccagaaatgctgccttctgtagcaagtaaactttaaggatttaataacattttctagttacagtgggtttctaatcttcataggaacaagttttattttaacaggggctaaaacaggtatctggtgataacagattagcactgaatgtgtttaatcattgagcccagagcactttatctttttttttttttagtgttagctgttagcaagtattgtttactaaaggtttgcacacactcttgcctaattctaaatgtttttagaaacaaattaagatgaaactttaagatttgttagagaaagaataagaaacagcaataaactttattctccttaaaatgtaagatcctgctatgattcttcactggggggaaagaagatacatttagaaaattggttatctcagattcttagtatggttttagttagttagttttaccacttggtagagttaatgatttgacaaatgacatttgcttcttattatcagccagttggttgctagctttaaagagttattataaaggatttttttcagtattaatttatttcataaacatatatttaatttttatatattattatgaaaaaagggaattatttcattcttttttaaaaaagtctagaattagaggctaatatttccttatagaattgtcaggaaacaaactgttgtaataagttgtttttgtgttccaagagatgtgactttgtcagaatacatccaaattcatatttcttagcagatctttaacataacaccatttataattctttctgttttcattcttccttttttctcctggcctattgtaaagcagatctggcagccagaggttgtatcaggaaccacagaaagaccccactgcttaaatatcttcaaagcagtctttcactttgaatagatgaatggatattgctaccatgtaaggatatttaggtgaagctcatgaacaaatcttgttgtacagaagttatccctttgttctgcaatgccaaagtaaatttgggctcattattttatggaattataaagtaaagctaataaaatacacttatagcaacaaatgtttaattcccagtactagaaaaataaaatttaaattgtagaactaaactacttttaaaagcttttgaatatattggttaaatcccattaatacatacaaagttaggcacagagtttcttggtggatggaagaaagactgatttcacactattttaatcctctgtcaagacgcaacttattaattatatacagatagtttgtagccgatggatgtgatttttgttactgattttgcttaatgcagttacattaatgccagaatagtagaatcgtggaatagttatcaagttagaattttaagttcttggagataatagagcacattacactgcatatagaagatgatccataaattattagtgaaatagtaaatgatttagtgtgtccacagatgagtaaattaaggtcaaagaggtttaataaaaattttcggccgggcacggtggctcatgcctgtaatcccggcactttaggaggccgaggtggatggattactcaagctcaggagttccagaccagcctgggaaacaaggcaagactctgcctctactaaaaatacaaaaattaactggacatggtggtgcacacctgtaatcccagctactcgggaggctgaggcacgagaatcgcttgaactctgcttgaggcggaagttgcagtgagccgagatcgcaccaccgcactccagcctgggcaacagagcaaagctctgtttcaaaataataataataataataaataaataaataaataaataaataataaaaaaaattaagggaacaaagctagccagcagcagtgagagtctaaattctaaagaatttgggaagcctatataaggataattggattttgcaatgttaagatcaatggaatactgatttcacaaattcgggtgtctaagaactggtatcagaggttagcaaagcaggctgtatggcagcaatcgggccttggtggaagagagggtctcacgtttgcaagtgtgtgtagcagaccaatttattggccagtagctgcatgggcacttcctaaatgtttcacagattattagtttcacttagaattttctctctctggacctgaatctatgactctaaaacaaacccagaaaaaggaatcagtatgctcagaaagaaagatgtgaaaaacatccattctccagacaacgcatgtgaggaataaaaacaggtaaagtgattttgttcagcaccgtagactaaacttgactctggattgaattttcagagtaaaatgtgattaaaggcaaacatttagtactgtaaaacagaattaagattgtaatatttaggcatgtgtttcatgtgtgtgtatgtatgtgtgtatacctatgtatatatgtgtatgcagatacatacatatatgttacatatatatatatgttttaattttagtgctcaagggaggacccctggatggcacttacagattgattcagtttcactttcactggggttcacttgatggacaaggttcagagcatactgtggataaaaagaaatatgctgcagaagtaagatatacttttttttttctttccagggaaaaatgtttataagttgatatttagcattaatttcaaaagcttaatttgtaaattcaactcacgcccagtgaaccacttcttttacaaaggaccttcacatttgctttttataacctttaattgtgacatcatacttaacgctgcaaaactttctctactgtctccaactccaccatttgcaaaaagtaaacggactcaaactggaggatcctgttttaacagaaatttagaaataaaatgtgtgccttctgtcaaaactgtacatttatttgtcttagagttattgatgaaaacacttgctgttataccaagtactgtgtggatgattagaattaaaatgaaaggaaaattttgatttaaaattatccatattttcaatttcctgagtaacctttattgtgagaaaaagaccattgaataaaatctgtcagctttgattatgtaaatcactcactgtggctttgtctcttcggccttagcttcacttggttcactggaacaccaaatatggggattttgggaaagctgtgcagcaacctgatggactggccgttctaggtatttttttgaaggttagttgatgacccaattcttttttttccctatttttaataaagaatgaccagacagagtatttgtaacatacaggacattctacaaaagagcttaggaaatgcctttgtccctgaaatgttttcaagtttatctcctcctttcatatctgctagttgcagtggagatggagggcagaaagacaataggagaggtacttatttggtaccttttggatgtaaatgtgaagaacataaagagatcaacttgggtgactgctaggtgtttgtttgttttcttttcatttaacctgaggctagacagtactatattatgataaagtaagatcaggttctgaagaggggaaggacagtgaatttcaggcaacagtgggacagaaccggttgagctgccctctaaacagtggtaaaggggaatggagaaaggtctgggctggagatttatgagctctgattcatatgttgaggtggaagctacaggtgtgtatgaaatcatccaagtacagcacgaagagggagatgagaaatctgcccagggagcaatcctgagaaactgcaaaatgtaaggcctttacaaggggagagatgcaaattaaacaacttaaaaggggccaggtgtggtggcttaagcctgtaatcccagcaccttgggacaccaaggcaggaggatagtttgaggccaggagctcaagaccagcctgggcaacatagcacaattccatctctacaaaatttttttaaaaattagctgggcataaaaaacaaactaacaaacaaaaaaacaaaacaaaaacaaaaacacaaaattagctgggcatggtggtatacacctgtagtttcagctacttgggaagccagggcaggaaaatcactgcagcctaggggttgaggttgcagtgagctatgatcatgccactgcactacaagctggatgacagagcaagactctgactctaaaaaaaaaaaaaaaaaaaaaaaaagcgagagtcaagagagatttgggttgctggaaggcgtagggaaagccaaagaagaaaataatttttaaaaagaagggaagaccatagtgtaaagtcctacaaggaaatcaaggcaagcccttgaggagtatcctttggcagttagaggtcactggggacaattgagctggtggtttcaggactactctctgagtggaattagaggcgagttgaagattcagtgaaagtaggcaagtctatggtgtcagtgtcatcaagccagtactgatgggggtcatgtatgaagtggagaatttgggctcactatttggatgttttctaatagagctacccaaataaaaataaaaactggtacagtaccaactgggtgatagtatcttgccctttatgtttttctttaggttggcagcgctaaaccgggccttcagaaagttgttgatgtgctggattccattaaaacaaaggtaaatttgaattttctgccacctccttagggtaccaattttcaatactccattggttttagaaatttcttttgatcaaattgcacagtctcaatgacatgtggtgtttggatgagcagttagtaaaggtagaatattacttaaatatttaattaacgtttctttcaacaaagttgatcctaatgctagcataattctaagacttgtatttatttaatcttgctcccccatcatttggacatccatatgtaagagtcagagaatcttatgcctgcaaggaggttcaaaggtcctctagtcaaattattcactcattcatacagcagatatttgttaagtatgtactatgtgccagtcgctttgcaaactagtagacacaatggtgaacaagataaacaaggccctgtttcatggagatttctattctatgacctctttgcattcatccatcctgcatttaaatcctctctgcagcatagttgtgttgaggtcgttgagcatctgtttaaacactacagtcacttccggtgatggggaacttatcaccaggggcagccctggctttataaagctgatcttcacattgaagcagcatctatcctctgaaatgctcactcactggcttgagccccttgaattcatagaataaacctgatctctcttccaaataactctactctgtctctactttgttttttcacctaccccaaactaattatctttagtttcctttaactattctcatatgatatagttttctctctttgccaccaccttgtcattcttccagtaaatcattcctgtttgcttgaaaagtgtagtgtccaaaacagaatgtagttatttgattctgacctagagcaagaaaatcacctcctcatcaggataccatatttctgttattgcaacttgaagtcacctcattttagtggcagcagtctcactttaaatactgggtgtgatcagctaatgacttaatggggaatgtaagggatcattttagataaaaggccaagatgaaaaatggacatgtgaaaatagtttttttttttttttactacgacttgccacatattttcaagttgaatgtcttctgttaatttctctttattttgtttgccagtgaatatagaacctcttttttaaaaagtgtttttgaccatcagaggggagtatacctatttgtgtctgctgctctcctaccttcctcctactctgtcaatgtgatagtttgaagctgcgtatttgccttgttctagggcaagagtgctgacttcactaacttcgatcctcgtggcctccttcctgaatccttggattactggacctacccaggctcactgaccacccctcctcttctggaatgtgtgacctggattgtgctcaaggaacccatcagcgtcagcagcgagcaggtttgttttgtaatgacaggtctgtttacgggtggagcatttagtcaaggcagaagaccttggcctccagagtgagagagaactgagatttaatccttctcctgctacttcttgctatggaaatagtgcctttgatggtgcctagcaaataaacagcgttcagtaaatctttgttgttattaactataaacttagttcgtttagtctctaaaattgaatagtcattgtaaggattcaatgagaaagatgtctgtcacctaataaatgcctttttttttttttgccagttatgaggaaactaaggcttagaaaagtgagagttcatattcaaggttacgcaggtatcagtgagttaccagcctactactcactcacataagggctttctgctattttatttatatcagaatgcatttctgaatcctgacagatgagagtcatcccttggagaacatgtatctattaaaactcactccaggttgctttagaggcttagagcaggtattcttacatttccaataaaatatagtgtgtgatcgtcaagtgattagtgcagcttctaagtcactgatgagcagccactaaagtggatacaaatgagtttttcctagacttacctcttagcgcacagttgaaatgtagaaagtgaacattccttaggattcacaagaggatggatcctgaataatttaaggatagctttaggagccaacagtcttgaaaatggtaactatgtgagtagtggtagtgtgatttaaacctacaaaaatgctgaataatagaggtttagagctgcaatgtgcaatagagatcatgttgtccaactttctcatttcactggcttgaatcacattgatcaacagtctgagatgcaggaaaattgaagtgttttccactcagctaccttgcaacagaatcaggcctgggagcaaggattctattcctgtgtcctcccttagaatatgaacttatgaatgctgaagatacttcatatctttctttaaaggaaatatgtatctgactggaaaattacttgtagcatatcaaagtgggcctaaaaaatagcatgcttggtatgtcacttgaagattgaccttgtagtaataacatatttgagtaagcttcttgaagtgtagcgtaaggaaagattataatgcccttctttttgtagatgcagtgtttacattataatttaaaacatgaatttttttttcttctttcactgagagcaatgcaactttaaagcaatagtctgacatttagagccattataacaaatggatttatggtgtatacacacccacaggcagaaatacacatatagataagggcagttgaacctactgcattaatccctgtaccctgagtttgctctttaaagttgaaagtggtattaaactaatgatgttaattgtatatattggcaaaataccaatagggctcttttttttgtcctataacatggaatctggaggaaggatcatgctcagctcaggaagctagggctgcaggtcctcctctatctgagtcccttgacttggccttgccaattggtgacttcatcctcaaggtggttgtaatagcattttgagcatcacatctagatataaccacttcttgaggaggaaatgaatacctcttccattggcttcctaagagcagagaagctctttcctgaaggcccctagaaaacctttcacttctcactggctagaattgtgtttcttgctcagtccctagcccgggaatgtgatcatcacagtcagttaagacctgcaggtttaccccactgaggcttacagggagagggcggatgtctgttaatgaggaagtatgggggggcgtggattttaggtaagcagtataaatgggtctgctaattctgctacctttattttctatacccaggctctgtctctgtgatgctaaaacaatgagtcaagttgactaatgtgacagtgtagtttaattggtgcagtgagtagcagaaatcggttatactggtttgatcaaaagtttgacctgtttacactttatgaacagactctctttcagattgctggaattctgttgtaacgaatcaaccctatatatccttagaatgctcccttgcattcagtaaccatagctgtgcatgttataatgtatgtgcatggaaggtggctctacgggggtgattgagggactattactggacaaaagagatcaggttaaaggctgttgattcatgggctgctatattactgtccaaaccacccttttgcatttggatcacgtcttggttagaggggggaaagtagcactttttgagaaccttgaagaagtgggagactgttcaacagctgcctgtatctcagtggtggccagtaaactgaaacaagtttataagggaataaaaatcaaccagtgacaaggggttctaatgttaaatgcatatattggcaaaatgccagtagggctatgtagggtggtgagcactcacaattgttcactaaaatgctgtttttaaaacaggaaagtagaatggttgagtgcaaatccatagcatgagataaattgagcttcttaaggcaaatcagcctaggcaaattcatttccgtgtttttgtgtatttggagatgccagctcgtcactcagcccatggagcttacaggtcctgatcacttgatctaattgtatggatgtggtagtttgtcttccctggggcagaaaacaaagctttaatttggaactaaaattgttattattttgcatctaaaggtatgagtttatagacttttgatgttagatttttaaattagaaggtcactgaaaatttcccttaaaaatgaccccaacgaatttgtgtattttgtataaattggtttgttatattaaagcatacatacataatctatatgtgattatgtattcattaggaatcaaactgaattttggccattgatgcacagcactgaatgttgtggaatgtaatttttgtttgtttttgtttctgttttttgaggcagagccttgctctgtcgcctaggctggagtgcagtggcgcaatctcagctcattgcaatctctgcctccagggtttaaatgattcttgtgccttagcctcctgagtagctgagattacaggtgctctaccacgcctgtttaatttttgtgtgtgtgtgtgtgtgtttttttttttgtagagacagggtttcaccatgttggccaggctggtctcgaattgctgacctcaagtgatccacccgcctcatgcctcagccttacaaagtgctgggattacaggcatgagccactgcgcctggccggggaatgtatttaaagatataacacaagtatataactgaataccattgtgaaacattaattatcaatgttttattgtgtcttttaggtgttgaaattccgtaaacttaacttcaatggggagggtgaacccgaagaactgatggtggacaactggcgcccagctcagccactgaagaacaggcaaatcaaagcttccttcaaataagatggtcccatagtctgtatccaaataatgaatcttcgggtgtttccctttagctaagcacagatctaccttggtgatttggaccctggttgctttgtgtctagttttctagacccttcatctcttacttgatagacttactaataaaatgtgaagactagaccaattgtcatgcttgacacaactgctgtggctggttggtgctttgtttatggtagtagtttttctgtaacacagaatataggataagaaataagaataaagtaccttgactttgttcacagcatgtagggtgatgagcactcacaattgttgactaaaatgctgcttttaaaacataggaaagtagaatggttgagtgcaaatccatagcacaagataaattgagctagttaaggcaaatcaggtaaaatagtcatgattctatgtaatgtaaaccagaaaaaataaatgttcatgatttcaagatgttatattaaagaaaaactttaaaaattattatatatttatagcaaagttatcttaaatatgaattctgttgtaatttaatgacttttgaattacagagatataaatgaagtattatctgtaaaaattgttataattagagttgtgatacagagtatatttccattcagacaatatatcataacttaataaatattgtattttaga

SEQ ID NO: 739 - DNA, 39111 bp, Homo sapiens
acccggcccggctccctccctgcccgtccccgtccccccacccgtgccagcccccaggatgggtgccccgagcgcgtgccggacgctggtgttggctctggcggccatgctcgtggtgccgcaggcaggtaagagccccccactccgccccctctcgatgctgtcttcacggcgggggtctctgcaggtcgcttgcctgggagcttctcctgcagagtgcacgggcagatccccctacgactccctgagtgtcctggatgggaccctacccgtccccaacacagggctctggggccccacgggctcacagtgtcaggaaactcaggggctggcttggatggggtgtccaggagaaggtgggcccctgaccgcagggcaaggcccctgggagaccaccgaaagggtcttggtcttgggggtgggacaggagtgggcaatgggggagggggtcacagctgggggtctctctggagccccatgaggcccaggcatcagagtgagcaggggcaggcttagcgtggacccctgtccaggaccggctctacccttcacgacctccctggggatcacagctggcagggcaggtgagggtaccaccctcaagggttgcacagccagccgcaagagccccggcctcaacccacgctcgactcccacggcccatctgtgggcatctcatgccgcacgggctgcctggctctcagccgagcgttttccctcgtctgctgtctcttggccagagccgcagcattaatacttactgtcaatagagaaagatgcagccccaggggccaccgggagacacccagccgggctggccatgaggctgctgcagcccctccctgccccgccctccaccccctcccaagcttggggtctgggctgggcaggtgaggctccctggggtctctctccatctgtggaagggaggctgggtggtcagcagggctggaggcagggggcttcccccagtggctcccagcctgggcccggggggagctgcgtctggctgcaaggtttgggggctggtttgaccagaatagccacctccttgcatctgattcttccgggccatgcagccttggctcccctcacctgagcaggcagggcctagggactctcagcccacccgtcctcctgtcctccacgcacgtccaagttggggagatcaagcccttggcagggactgtgctttagtcaccagatgcacgtcctgtggccggggaaggcagccctgcacagagcagcttcatgttaggggacacaccccaaagtgatggggtggctggtggtgggcacttctctggctacaagatggaggcccaggtggtccagcccaaggagggcactgcacggagcagataaccaagggcagtcagcctgggcaggggaggggctgcctgggggggaggggttgcctgggttggggaggggctgtctggggcaggggaggagctgcctggggcgggggaggggctgtagggccagggaggggctgcctggggctggggaggggctgctggggtggggaggggctgcctgcggcgggagccggggcgtgggagtggctggttgggctggcacacaggggcagggctgtgagctgtgggtcggggtggaggactcagggatcggctggctttctgggaaaggcagtcaacctggatctctggaggcggcccctgtggtggttcccagatgtcagcaggacctggctggaaaagccaggcagggccaggccagagtgcgaaccacagggccggcccctcgctgagccctgaccatgctgtgggggctggggcctcacctcccacctccccacagagagtctcagatcaggatccagggaggagctctggggtcctgtgaagggggcgccccaacccaaactgggcagacaatggccgggggtcctcagagtcctgtgggttggagctgcctcctcccagcctccatggggttggtgggtgaggccttgcccggaggcggtggtcagcctgggggaccttgggcggccatcccagtatcaacggccacacagcttgcgcggcccagagtcctgcccccagcctgccccactcgccctgacttaggatctagttcgaaactggttctgtgtttaggtttctgctaagtcacgcctggaaggctccaagtgtgtcctcctaacaaagctggtctttgtccttctccaagggatgtgtgggatggggcgaaatccccccttggggcggccaacgccttttcctgattccattttctcccccatcccttgagaaggaggcaccatccccgcctgtcagtcggggacagggcaggccgtgctgggggcagctcagggctccctgctggaagcttccatcccgcaggctttccatagcattgagcaggagcggaggcatctgcggctgacggttggggtggcctgagcggctggggaggagtcccggccttggccacagtgtgtcgtgagggtgaacctgcagggcatggagaccgccaccaaggaccccacatgcggctgccgcaccagggatgtggccaggtccgtggttgggttcgtggctggcagccacatctagttcctcactgactcccattccctcttcccacagagacccagggccctgtggagccgagctgggagaatgcagggcacaccatggatggcggtatgtggccaggttcgggggtggggggttcctgaccaggctggaggggctggaatttgggctggggcaggcagacgcctctccaagcagccatgcgtctgacagagaccctccctgggtcccctgcccaggacaatacccagcacccgaggcggagcttggtgctccaaagaagaggaaagtgcagagcagagagacatgcacacagaagcacacgcgtggacaggcacatgcgtgcccacacttacactggcacacacatgtgtgcacacacaggccaaaacacaagggcagcagtgtttgtggggcagacagggccaagggtaaaggggctgccttggccccagcccatcagttttgggctccccttcaactctggtggctggcgaggagggtgggccccggggagggtgtctctgcttccccttcctggccacgttcctggggtgaccagccttcacccacaggtgccccgacgtcctcgcccacccggcgcgtgagctttgttccacccgtcactgtcttccccagcctgagccgtaagcagatgctgcccctgccagccgggaagggggtgtttgccagtcccaaaggtgggggcccagatctaggggtgcagctgccaccaggtggggccgttgggccagacccagagtcctccgtgtgggcggtctcctggtcactggccaccctgggggatggggacgggtcaggggtcttggagcaaaacagacgcagtccagggtgagccaggcagggcacagccagcagccgaccatgggcttttccattccaaaaaccagggtgcctcggcccaggggaggctaccccgtggggggctggcatggggatgggcctcatcccgcgctccccacagccctgaacccggcgcacaatgggcgggtgtgcagcacctggggtgacttccactacaagaccttcgacggcgacgtcttccgcttccctggcctttgcaactacgtgttctctgagcactgccgcgccgcctacgaggacttcaacgtccagctacgccgaggcctagtgggctccaggcctgtggtcacccgtgttgtcatcaaggcccaggggctggtgctggaggcgtccaacggctccgtcctcatcaatgggcagcggtgagccggccaccctggggaggggcgagggccgggccacacagtgtgacctccccacacggccatgtctgacctgggccagggctgggggggggttgggtgggcaggcagccaggagagcggggcccagggagagaccccgctgtctgcgcagggaggagctgccttacagccgcactggcctcctggtggagcagagcggggactacatcaaggtcagcatccggctggtgctgacattcctgtggaacggagaggacagtgccctggtgaggaagccccctcgccccttgccccttcaggcctggccacaaaacccccaccgggggtcgagggatgcctccctgggcttggggtcacggggcttggggcatgttgccagtgtggggatcagaggtcctgaggctggagctgcccctccccactctcagctggagctggatcccaaatacgccaaccagacctgtggcctgtgtggggacttcaacggcctcccggccttcaacgagttctatgcccacagtgagtgccacctgggtgagggggcggtgaccaattatgtcggccaacgaagagccacagtcccggggaggccgggagggggcggagtggggaccgggcaccaggcagggaggggccacgaggactgtgccctacatggtgggaggagtgcccctcgggggtgttgggccctaggcaggagtgggagtcctctggcctgggctcaggaagtgggagcccatatcttgtccccaggagcccctcagagccaccacacccctgctttcttcccggcagacgccaggctgaccccgctccagtttgggaacctgcagaagttggatgggcccacggagcagtgcccggacccgctgcccttgccggccggcaactgcacggacgaggtgagtcccccgccacccccagctcctgggcagggacggcctccaggtccagggggagctgggccgaggtctgaggaatgttcccagctggtggagagatggtgccattggagggaggccgggcagccaccctctgtgtgctcagttccacggtacacactgtccgagtgtggtgacgtgcgtgttcatcaggccacgcgtgtgcccatctgtgtgagcaaacacaggcccatgctgcacaggctgggctgagggtgggcactcgggaagcccggagccagcccttcccaccagcaggtggactcagaaggggcctggaggctccaggatccccaaaccagcaggatctctgagccttaagttgtgctgtgaatgacagcatgagcccccctgtgagctgggccccgcagccggcagccctgggcctggggacggaggacactcagcactggactgccctgaacctgccgggctgcccagagaggcggggcctccacctcccctccttggctccgcctcctggggtgggggtctgcacctttcttgggcgcttactccacgggcaggcacatccggagtaggggatccccggtcacgggtcactccccaagggccaagcagagctctgcatggccacagtgggtggaaggggtggggctgggtacaaggaaccccgacagggagagggcttcccggcctggcctgccatgggtcctattccagcaccgtggcagcccccatggatggcaggggtgcccagcctggcccactgtgctccccaggagggcatctgccaccgcaccctgctggggccggcctttgcggagtgccacgcactggtggacagcactgcgtacctggccgcctgcgcccaggacctgtgccgctgccccacctgcccgtgtgccacctttgtggaatactcacgccagtgcgcccacgcggggggccagccgcggaactggaggtgccctgagctctgccgtgagtgctcccagggccttcgccagggattgtgccagagagaaggggcagggggagcgccttgggggccactgggggtggggaggcctgggggacaggggtggagggcagaggacccaccccaggcatagtgggcagaggccaccccaggaccccaggagggggtggggcctccgggggctgcaggagaaggagaggctgtggagaggctgtgcagcaggtggcgggggctggggctggagggtggagctgcccacgatgaggggcgtcagggccaccctggggcctagctctggcttctgtggacttgatggcatgtggaaggccgtggaaggcggctggggctgaccacacgggcagtacagggcccttcccctggcccagccccacctccttttgcgcagcccggacctgccccctcaacatgcagcaccaggagtgtggctcaccctgcacggacacctgctccaacccccagcgcgcgcagctctgcgaggaccactgtgtggacggctgcttctgccccccaggcaggtcttgtgtgccctgaacccctcagggggctttcaggtccctgctcccaaccccgcccccagcctcatcaggcgtggaagcagagcccctcatgccagaaggtcccaccagagggcccagggtgggaagggcactggctgggagggtgccggaagacctgccgatgcgtggagggaggtagagcagtgccatgagccagctgggcatggtggggaaactgaggcccagaggtgcttggtgttcatccaagcgagtgcagctcagggcgggggcggtgtcctggagcaggaattcctccccaagggaggcagcttgtccccaaggccggtgtcttctgaccttggtgtcccccgtgcatgggccggccctgcctcacgccgcgccccacaggcacggtgctggatgacatcacgcactctggctgcctgcccctcgggcagtgcccctgcacccacggcggccgcacctacagcccgggcacctccttcaacaccacctgcagctcctggtacttatgagcccaccagcctccgcctggggtggggtgtggagctcctggtatttatgaacccgccagcctctgcctggggtgggggtgtggagctcctggtgtgcacccaccagcctccgcctgcggtgggggtgtggagggtggggcccacctcctcccgacatgccggttctgctcacggcctccctccccagcacctgctccggggggctatggcagtgccaggacctgccgtgccctggcacctgctctgtgcagggcggggcccacatctccacctatgatgagaaactctacgacctgcatggtgactgcagctacgttctgtccaaggtctgggcttggggccgggtcttcagacacccagaccctcctgggaccctcatgccacttccacccaggggaggcccccacgatggtcatagaggggtggatgtccctgctgaggggggagccctgggtccccatgatggtcatagagggatggctctccctgctgagcggcatggggccaaggagcccccaggccctgagacaagctgctgggaggtgaccagaggtgccaaggaccacctccccacagagccacatcccccacatgggcatccccagcacacttctggggggcaccccacatcatcgagccaggcccaatgcacgcgtgggtccttctccccagaaatgtgccgacagcagcttcaccgtgctggctgagctgcggaagtgcggcctgacggacaacgagaactgcctgaaagcggtgacgctcagcctggacggcggggacacggtgaggacctggctggggccctgggctgggacaggaagaggcatgcgaaggtgtgtggggagcaagcacggtcaggtccccctccagccccgaggccaggtcccccctccagcccccaggccaggtccccctccagcccccaggtcaggtcccccctccagccctgaggtcaggtcctcccgggggggcaattgcagagcccaccgcaggtccaggtctgagcttctctgtgggctctgtccccagtgggggcccctgggcaggccaccccctcatttgagagtcgggaatgggttcctccccagagctgacctcccgcccgcctccttccgcaggccatccgggtccaagcggacggcggcgtgttcctcaactccatctacacgcagctgcccctgtcggcaggtatgtggctctcccaggacggccgggctgggtggcgcctgcttgcaggggcagctcccacagcctgggcagcgtccgctccatccctgctagttctccgtggcctcgggcagctccaggagctccctgtgctcggtttctcgtctgcagagtggggatgccaggctcccaccccggcagcggcagggaccccacatccagctcgctcagccccactctctcagggagcccggtctccacctgagcccacttggcggccacaggcatgggacagggagcctgagggctcctggccactcctgggtctcactcccgggtctcagtggggtggcccggcccactggatgccctgcccctccaatctagccagatctgtccctgcacccctgaccggcctctcccccacactcccggcagccaacatcaccctgttcacaccctcgagcttcttcatcgtggtgcagacaggcctggggctgcagctgctggtgcagctggtgccactcatgcaggtgtttgtcaggctggaccccgcccaccagggccagatgtgcggtgaggctgggcaggggccttcggggacagggccattggggacggggcctggactagcgccaggctgcagggaggggcaggcagaggcgggcaggggaccggggagggggctgcccccagggcatggcggagatcctggtgccagcgcaggacaccagcattggaccagcggccccggaagcagccagctgggaggatggagcgggcagccctgccctggctcaggccgactttgcacaggggctggctttgcacaggggccgactgcacaggggcgccccccgccagggcttatctgcagagggttctgggagcagaatcctgggacagggctcccagccgttccaccctgtgtggtgcctggagggatggcaggggccaggagccaggtgggcccaacagtggccgctgacatcccccaaccctggcccccaggcctgtgtgggaacttcaaccagaaccaggctgacgacttcacggccctcagcggggtggtggaggccacgggcgcagccttcgccaacacctggaaggcccaggctgcctgtgccaatgccaggaacagctttgaggacccctgctccctcagtgtggagaatggtactcctcgcccccacccccacagtcaccccaggctcaagtcccacccagcaccttcctgtcccctgggccacggggacccctgggtgggattggggaccccatggaggcaggtgggaggcatcaggaggaggtgcttggggccaggcggccagaaccccccaaggcgcagcaggtgagccgcaaattccaactcactgttccccgggctgagggggtcgcaggcctgcgtgtcaggggtgtgggcttcggggcagggcgtggagatgaggtcaggtcttccccacagagaactacgcccggcactggtgctcgcgcctgaccgatcccaacagtgccttctcgcgctgccactccatcatcaaccccaagcccttccactcggtgagaggctgaggccagacccccacgcctgggcaggatgggtgggggagccctggcaggctggggtccctgacgccccgatgcctcccacctccgcagaactgcatgtttgacacctgcaactgtgagcggagcgaggactgcctgtgcgccgcgctgtcctcctatgtgcacgcctgtgccgccaagggcgtacagctcagcgactggagggacggcgtctgcagtgagtgcccacgctgggggtgggatgtgtccacaccgcgtgggggtgcgggggaccctggccggcagcagccgtcactcacacggttctcagcccagagctttgcacttcctcatcccagcctcgcaagaacctcatgcccttgcgatccccacgtcacagacggggatgctgagttgaagatgggggctggccaggctgctcggccgctgacctgtcccccctggccccaccgaccacagccaagtacatgcagaactgccccaagtcccagcgctacgcctacgtggtggatgcctgccagcccacttgccgcggcctgagtgaggccgacgtcacctgcagcgtttccttcgtgcctgtggacggctgcacctgccccgcgggcaccttcctcaatgacgcgggcgcctgtgtgcccgcccaggagtgcccctgctacgctcacggcaccgtgctggctcctggagaggtggtgcacgacgagggcgccgtgtggtaagggtctggggggaaagcaggccccccaggtgctcctcagagccacttcccgccctccccgaaggcttctgtgcctccccccgagggttctgagacatgaggggccaggctggggagagtggggcagggtggacccagcacattctgaagagaaaattcccagctgggaaagaggccaggagaggaggtggccctgggaggacacctgctggctgttctcagctgggtccacatggcagcccctgccaggaaaggtgggtggcccccactcccaccctgggctcaaaggccgctcctaaccccagggtcctggctgctttgctgcccccctgtgtgtatttacccatgtgcctccaggggatttgggggctcccagcaaacacagcagcaggcaccgtctggccttacaaggaggtggccaggctggggaggcccagcgttcggcgggggctcggaagcccgggggtggggtctgcggggtgagggccgcagatccaggctgtgccgtctgtctcttgtagttcatgtacgggtgggaagctaagctgcctgggagcctctctgcagaaaagcacaggtaagtgccacccctgccctgccctgccctgccccgccccgcatcaccccgcctggcctggccccaacacgccccaccctgccccaccccacctgaaccctgccgggccaggtcagtcctcacctgggctctgccacaggcacccatgccctgacacgccagggacggaggggccagtgggtctctgccccgcagtgtggccggggtgtcctggggttgggggctgcaggtgtcatggaagctttggctcgggggctgttaacttgatcagcaggacaggctcagggctgcctggggtcagttgagggccgtggctgcccttccccaggacccctcccaccaagctctgtccccagggtgtgcagcccccatggtgtacctggactgcagcaacagctcggcgggcacccctggggccgagtgcctccggagctgccacacgctggacgtgggctgtgtgagttccatgcttcagggaggggtgggcagggaaggggtcccagctttcccagctcccgagcccagggatctggtggtcctggagacacttacccacctggaagctccgccctggcccatgcgttgccctgggtgctgctgggtgcgcctgtcccagagggtgagtgacatctgcccaccctggtgtccagccctgaccggtacctgcctgggccccacagttcagcacacactgcgtgtccggctgtgtctgtcccccggggctggtgtcggatgggagtgggggctgcattgccgaggaggactgcccctgtgtgcacaacgaggccacctacaagcctggagagaccatcagggtcgactgcaacacctggtgggtcgtgagtctctcggaggcagcaggtggggagggcgggggcggggagggcagcgggtggggaggcagcgggcagggagggcagggggcggggagggcagggggccagctggccagggtgaggtggggccgtggcaggagagagagttgctaggaaagccatgggccgtcctgtgcgtcctctggaaggtggcccaggggccgtggtgctaccaggagcctggtggggctgcgtgccctgcattcacagtgggggacaccacttcttccacggaggaggggtcaggctgggcctggggaggctgaggccccgtgctgacctgcacaggcctgggtgccgggtctcaggaaggccgggagagcaggcccctgtgagcaggcaccattgtggccccttgcagcacctgcaggaaccggaggtgggagtgcagccaccggctctgcctgggcacctgcgtggcctacggggatggccacttcatcacctttgatggcgatcgctacagctttgaaggcagctgcgagtacatcttggcccaggtacgccgccccctcgcccactcctgcaggccgggcacactccagcccgcggccagcagcttgtctctttctggcccaggactactgtggggacaacaccacccacgggaccttccgcatcgtcaccgagaacatcccctgtgggaccaccggcaccacctgctccaaggccatcaagctcttcgtggaggtgagaacggccccagctgtgagcacccccgaccctgcagccaacgagccggcccccagggaagcttcgtgaggctttagctgcacccacaggttctcagcagtgtcctggccccgggctgctgttccaagcagccacaaaccagggggcttagacaacagaaatgcattctcagtcctggagccggaagtcagagatccaggcgggcagggccacactccctgtcgagggtctggggaggtccttcctgcctctcccagcttcacaggcggcaggcgtccctgggctgtggctgcctgtggcctcccgctgtgtctgcgtctgtcttctctctgtttttctcttctgtctcttgtaaggacactggtcattggatttagggcccccccccgcccccacgtagtccaggatgatctcatttcaagatgcttcacttaatcccgtctgcagagatgctttctcccagtgagggcccgggctgaggttctgggagttcgcatgtggacaggcattttcaggagccacgattcaccctgccacacctagagacacccactccagcaaaggggggccagagctcccaggggataaagcagcgccgctggccgggatgctccctgcagatggcgggaggggctgaggaccgcagcgggtcaggggaggctggtgtgagggcgtgggggctgcagggctggatggggagcagggtggggtggagtgggcctactgcagcctctgctgctcccgtgcagccccaaggttcccaggcagcccctgttcccagcacttcctggccagcctcttgccaaaccttcgctgagggtctcacggacccagctcacccctaacgccagccgcttgtgctaagagcccgtgcgcacctgcagagcactgggtggggcatccctgggtctcaggcccctccctgggggccacagggtcggcttccggcagcgtctgcctcccctgcagagctacgagctgatcctccaagaggggacctttaaggcggtggcgagagggccgggtggggacccaccctacaagatacgctacatggggatcttcctggtcatcgagacccacgggatggccgtgtcctgggaccggaagaccagcgtgttcatccgactgcaccaggactacaaggtgagctcgggccgtgcactcctaggccctgcaggaccctctcacagtgacagaaaccctggtgccaggtggggtctgtgggactcgctgacccgtgggtgcgtgagcctggctggtgagggccctgcctgtggcctccacagtgggcagaggattttgcagggaagcaggtgccacccagcggcccacccagggacccactgcacacctgtctcctacaagttcaccaggcactgcctggggaaccggctgccctccctccatcccccgagggctctggagcccagggtgggctctgtgctgcctcccacgggtgcctgtggccccagctccagggccccactctctcgctgcctctgcagggcagggtctgcggcctgtgcgggaacttcgacgacaatgccatcaatgactttgccacgcgtagccggtccgtggtgggggacgcactggagtttgggaacagctggaagctctccccctcctgcccggacgccctggcacccaaggacccctgcacggccaaccccttccgcaagtcctgggcccagaagcagtgcagcatcctccacggccccaccttcgccgcctgccgctcccaggtggggctctggtcttggcaggcagggtctggtggggatggcagttgcttccttcccgccgagaactgggtcttctgggcagacagcagcgctccaaggagggtctgaccatgtcccacggcacacagtcctggatgtcaggtcccaagtccggatctcccgtcagccccacacctgtgcctcttgcccctggcacgaagccatcttggctgtttcccggccactcctttgaccacagcctcagtcacacccagaggctcacagggaggggcagccctctatgtggcccctagccaccctcctctatgatccccagacctgcccagtcctcagcacaaactggaatgccagcctggctccccgctcagccagggaggaatcagagatctgccctaagcagagacttccaaaaagcagtttcctgactgggcgcggtggctcatgtctgtaatcccagcactttgggacgctgaggcaggtggatcacctgaggtcaggagtttgagaccagcctggtcaacatggcgaaaccccgtctctacaaaaaatacaaaaatagccgggtgtggtggtgtgtgcctgtaatcccagctactcgggaggctgaggcaggagaatcacttgaacctgggaagaggaggttgcagtgagccaagatcgtgccactgcactccagcctaagcaaaaagagtgagactctgtctcaaaacaaaacaacaaaaaaccaaaaagcagtttcgtgtcatcttaaggaagacttgagtgcccacttaggcacacagcatggtggctcaggagctgagatgaggggctggcgtaggggcagcagtgggcatactcgctcgtgggaggccctgaagcactctcatgtcggccgccgcttgccctcttgagaaggcagctggtgaccccttggaaggtcctgtggcctgacaaagctgagcccaggttcagatggggcctgggaggggtgtgggctgcctggaggaagcaggcagcttcccatggtcaggacgcattcacagctcagctccccgcgtggctggtctggaaaggaagtgaccactccttccttagtgcacattcactgggtgcctggaatagcctggcatgttctgggctcaccccagtgatcaggggacgaggctgaccctcacagagcttccagaggaggcagaaaggcggtgggtgctgggtggtcggatgctaggatgtggagggccctggccgggggttggttccgctggagggaaggcccccaggtggaaaggaggccagtacgactgcagcggagggaggtgggggcgagggcagagggtaagcaggggtgctatgctccacatgggtttgaaacctgtgggccacatgaccagatccacgtgatagaaagatccaaagagcacatgtgaaggcaggcagatgggcaggtgcataggtgggcaggtgcataggtgggcagatggacaggtgggcagatgggcaggtgggcagggatataggtggacgagggcacaggtgggctggagaagtgctggggcagctcccatttggggcacgctctgaggtattccaggccccaggagctcagagagctgccatggggggtgttgaaatacagatggttccagcaactggccctgggccagccaccccctggccgggggggccattgtcccggctgagctgcaccttggcctcacccgcaggttgactccaccaagtactacgaggcctgcgtgaacgacgcgtgtgcctgcgactcgggtggcgactgcgagtgtttctgcacggctgtggctgcctacgcccaggcctgccacgacgcgggcctgtgtgtgtcctggcggactccggacacctgccgtgagtcgggctctgtccgtggtgctgaagggtggagctgctggggcaggggaggaggtgtggcagcctccgaaggtgcattgacctgggcctgagccgcacacagacatccaacacgcatgtgcctccatgtgagtgcacaagtttctatgcacagaggaagacctgtgcaaaaccaccagacaggttgccccagcatgagacagctcctaggggacaagagttccaagggcagggctggggagtggaggggaaggtgaggcaccacccggccgaggccctgcatgtctgggacaagcccgggtctggctctggggacaccggcccccacgcccggggtaggggctgccctgcacaacaggggtgagggctggtgggcgcctccttagcctctgccctctgtgccccagccttgttctgtgacttctacaacccacatgggggctgtgagtggcactaccagccctgcggggcaccctgcctaaaaacctgccggaaccccagtgggcactgcctggtggacctgcctggcctggaaggtgaggggcagcctttcttggatggagcctcctctccttgggttcccgagtgtacgtgggggggcggggatccccagggacgcggtgtaggctcccgtaaactgcacaatgcaagccttgagggcaggcccctgctggctggtggggggcggctactccctgcagcatggagcccctggctggagagactaaagggccctggtgagtcttctgctcaccctgccggccctaggctgctacccgaagtgcccacccagccagcccttcttcaatgaggaccagatgaagtgcgtggcccagtgtggctgctacgacaaggacggaaactactatgacgtcggtgcaagggtccccacagcggagaactgccagagctggtgagggggtgggaagcgggtggcgctgggggagcagggctggggagcaggccctgcaggctgccccccaggccctcagctcgcctctcccccacccctagtaactgcacacccagtggcatccagtgcgctcacagccttgagggtaaggaagggccggggggttagtgggccggtgaaggctggggccaggggctcggaggccctgggtgactctgccggctccatccccagcctgcacctgcacctatgaggacaggacctacagctaccaggacgtcatctacaacaccaccgatgggcttggcgcctgcttgatcgccatctgcggaagcaacggcaccatcatcaggaaggctgtggcatgtcctggaactccagccacaacgccattcaccttcaccaccgcctgggtcccccactccacgacaagtaagccctgcctggctctcctgaggcccagtaccgtctgggtgacaaggaggaccccctgggctcttagtgcaggtgccctgtatggtagcgacagtcccaatccactgaccttccgggctctgtctaggggtgcacggcccctcaacaccctgcgtgtctccaggggctccccacgaagcctcagcacaatgattgatgggataccccaaggagacaataaagctttcctggactccgtcccatccctcagcacggcctatcccagccagccagctccctcaaggccaggctgccaggccccagtccctcatgcagaaacggctctaaccaaggctgaggcaggcactggggtccccagtatcccacaggggcagggccagccctggggaaagggtcctctggggcccctccaccttgtgaggccaggactggaggatgctgagccaggacccctttcccatgccccttgcaggcccggccctcccggtctccaccgtgtgtgtccgcgaggtctgccgctggtccagctggtacaatgggcaccgcccagagcccggcctgggaggcggagactttgagacgtttgaaaacctgaggcagagagggtaccaggtatgccctgtgctggctgacatcgagtgccgggcggcgcagcttcccgacatgccgctggaggagctgggccagcaggtggactgtgaccgcatgcgggggctgatgtgcgccaacagccaacagagtcccccgctctgtcacgactacgagctgcgggttctctgctgcgaatacgtgccctgtggcccctccccggccccaggcaccagccctcagccctccctcagtgccagcacggagcctgctgtgcctaccccaacccagaccacagcaaccgaaaagaccaccctatgggtgaccccgagcatccggtcgacggcggccctcacctcgcagactgggtccagctcaggccccgtgacggtcaccccctcggccccaggtaccaccacctgccagccccggtgtcagtggacagagtggtttgatgaggactaccccaagtctgaacaacttggaggggacgttgagtcctacgataagatcagggccgctggagggcacttatgccagcagcctaaggacatagagtgccaggccgagagcttccccaactggaccctggcacaggtggggcagaaggtgcactgtgacgtccacttcggcctggtgtgcaggaactgggagcaggagggcgtcttcaagatgtgctacaactacaggatccgggtcctctgctgcagtgacgaccactgcaggggacgtgccacaaccccgccaccgaccacagagctggagacggccaccaccaccaccacccaggccctgttctcaacgccgcagcctacgagtagcccggggctgaccagggctcccccggccagcaccacagcagtccccaccctctcagaaggactgacatcccccagatacacaagcacccttggtacagccaccacgggaggccccacgacgcctgcaggctccacagaacccactgtcccaggggtggccacatccacccttccaacacgctcagcccttccagggacgacggggagcttgggcacatggcgcccctcacagccacccacgctggccccaacaacaatggcaacctccagagctcgcccgacaggcacagccagcaccgcttccaaagagccgctgaccacgagcctggcgccaacactcacgagcgagctgtccacctctcaggccgagaccagcacgcccaggacagagacgacaatgagccccttgactaacaccaccaccagccagggcacgacccgctgtcaaccgaagtgtgagtggacagagtggtttgacgtggacttcccaacctcaggggttgcaggcggggacatggaaacttttgaaaacatcagggctgctgggggcaagatgtgctgggcaccaaagagcatagagtgccgggcggagaactaccccgaggtaagcatcgaccaggtcgggcaggtgctgacctgcagcctggagacggggctgacctgcaagaacgaagaccagacaggcaggttcaacatgtgcttcaactacaacgtgcgtgtgctttgctgtgacgactacagccactgccccagtaccccagccaccagctccacggccacgccctcctcaactccggggacgacctggatcctcacaaagccgaccacaacagccactacgactgcgtccactggatccacggccaccccgacctccaccctgagaacagctccccctcccaaagtgctgaccaccacggccaccacacccacagtcaccagctccaaagccactccctcctccagtccagggactgcaaccgcccttccagcactgagaagcacagccaccacacccacagctaccagcgttacacccatcccctcttcctccctgggcaccacctggacccgcctatcacagaccaccacacccacggccaccatgtccacagccacaccctcctccactccagagactgcccacacctccacagtgcttaccgccacggccaccacaactggggccaccggctctgtggccaccccctcctccaccccaggaacagctcacactaccaaagtgccaactaccacaaccacgggcttcacagccaccccctcctccagcccagggacggcactcacgcctccagtgtggatcagcacaaccaccacacccacaaccagaggctccacggtgaccccctcctccatcccggggaccacccacaccgccacagtgctgaccaccaccaccacaactgtggccactggttctatggcaacaccctcctctagcacacagaccagtggtactcccccatcactgaccaccacggccactacgatcacggccaccggctccaccaccaacccctcctcaactcctgggacaactcccatccccccagtgctgaccaccaccgccaccacacctgcagccaccagcaacacagtgactccctcctctgccctagggaccacccacacacccccagtgccgaacaccatggccaccacacacgggcgatccctgccccccagcagtccccacacggtgcgcacagcctggacttcggccacctcgggcatcttgggcaccacccacatcacagagccttccacggtgacttcccacaccctagcagcaaccaccggtaccacccagcactcgactccagccctttccagccctcaccctagcagcagaaccaccgagtcacccccttctccagggacgaccaccccgggccacaccacggccacctccaggaccacagccacggccacacccagcaagacccgcacctcgaccctgctgcccagcagccccacatcggcccccataaccacggtggtgaccatgggctgtgagccccagtgtgcctggtcagagtggctggactacagctaccccatgccggggccctctggcggggactttgacacctactccaacatccgtgcggccggaggggccgtctgtgagcagcccctgggcctcgagtgccgtgcccaggcccagcctggtgtccccctgcgggagttgggccaggtcgtggaatgcagcctggactttggcctggtctgcaggaaccgtgagcaggtggggaagttcaagatgtgcttcaactatgaaatccgtgtgttctgctgcaactacggccactgccccagcaccccggccaccagctctacggccatgccctcctccactccggggacgacctggatcctcacagagctgaccacaacagccactacgactgagtccactggatccacggccaccccgtcctccaccccagggaccacctggatcctcacagagccgagcactacagccaccgtgacggtgcccaccggatccacggccaccgcctcctccacccaggcaactgctggcaccccacatgtgagcaccacggccacgacacccacagtcaccagctccaaagccactcccttctccagtccagggactgcaaccgcccttccagcactgagaagcacagccaccacacccacagctaccagctttacagccatcccctcctcctccctgggcaccacctggacccgcctatcacagaccaccacacccacggccaccatgtccacagccacaccctcctccactccagagactgtccacacctccacagtgcttaccaccacggccaccacaaccggggccaccggctctgtggccaccccctcctccaccccaggaacagctcacactaccaaagtgctgactaccacaaccacgggcttcacagccaccccctcctccagcccagggacggcacgcacgcttccagtgtggatcagcacaaccaccacacccacaaccagaggttccacggtgaccccctcctccatcccggggaccacccacacccccacagtgctgaccaccaccaccacaactgtggccactggttctatggcaacaccctcctctagcacacagaccagtggtactcccccatcactgaccaccacggccactacgatcacggccaccggctccaccaccaacccctcctcaactccagggacaacacctatccccccagtgctgaccaccaccgccaccacacctgcagccaccagcagcacagtgactccctcctctgccctagggaccacccacacacccccagtgccgaacaccacggccaccacacacgggcgatccctgtcccccagcagtccccacacggtgcgcacagcctggacttcggccacctcaggcaccttgggcaccacccacatcacagagccttccacggggacttcccacaccccagcagcaaccaccggtaccacccagcactcgactccagccctgtccagccctcaccctagcagcaggaccaccgagtcacccccttctccagggacgaccaccccgggccacaccagggccacctccaggaccacggccacggccacacccagcaagacccgcacctcgaccctgctgcccagcagccccacatcggccccaataaccacggtggtgaccatgggctgtgagccccagtgtgcctggtcagagtggctggactacagctaccccatgccggggccctctggcggggactttgacacctactccaacatccgtgcggccggaggggccgtctgtgagcagcccctgggcctcgagtgccgtgcccaggcccagcctggtgtccccctgcgggagttgggccaggtcgtggaatgcagcctggactttggcctggtctgcaggaaccgtgagcaggtggggaagttcaagatgtgcttcaactatgaaatccgtgtgttctgctgcaactacggccactgccccagcaccccggccaccagctctacggccacgccctcctccactccagggacgacctggatcctcacagagcagaccacagcagccactacgaccgcaaccactggatccacggccatcccgtcctccaccccgggaacagctccccctcccaaagtgctgaccagcacggccaccacacccacagccaccagttccaaagccacttcctcctccagtccaaggactgcaaccacccttccagtgctgacaagcacagccaccaaatccacagctaccagctttacacccatcccctccttcacccttgggaccaccgggaccctcccagaacagaccaccacacccatggccaccatgtccacaatccacccctcctccactccggagaccacccacacctccacagtgctgaccacgaaggccaccacgacaagggccaccagttccatgtccaccccctcctccactccggggacgacctggatcctcacagagctgaccacagcagccactacaactgcagccactggccccacggccaccccgtcctccaccccagggaccacctggatcctcacagagcccagcactacagccaccgtgacggtgcccaccggatccacggccaccgcctcctccacccgggcaactgctggcaccctcaaagtgctgaccagcacggccaccacacccacagtcatcagctccagagccactccctcctccagtccagggactgcaaccgcccttccagcactgagaagcacagccaccacacccacagctaccagcgttacagccatcccctcttcctccctgggcaccgcctggacccgcctatcacagaccaccacacccacggccaccatgtccacagccacaccctcctctactccagagactgtccacacctccacagtgcttaccaccacgaccaccacaaccagggccaccggctctgtggccaccccctcctccaccccaggaacagctcacactaccaaagtgccgactaccacaaccacgggcttcacagccaccccctcctccagcccagggacggcactcacgcctccagtgtggatcagcacaaccaccacacccacaaccagaggctccacggtgaccccctcctccatcccggggaccacccacaccgccacagtgctgaccaccaccaccacaactgtggccactggttctatggcaacaccctcctctagcacacagaccagtggtactcccccatcactgaccaccacggccactacgatcacagccaccggctccaccaccaacccctcctcaactccagggacaactcccatccccccagtgctgaccaccaccgccaccacacctgcagccaccagcagcacagtgactccctcctctgccctagggaccacccacacacccccagtgccgaacaccacggccaccacacacgggcggtccctgccccccagcagtccccacacggtgcgcacagcctggacttcggccacctcgggcatcttgggcaccacccacatcacagagccttccacggtgacttcccacaccccagcagcaaccaccagtaccacccagcactcgactccagccctgtccagccctcaccctagcagcaggaccaccgagtcacccccttctccagggacgaccaccccgggccacaccaggggcacctccaggaccacagccacagccacacccagcaagacccgcacctcgaccctgctgcccagcagccccacatcggcccccataaccacggtggtgaccacgggctgtgagccccagtgtgcctggtcagagtggctggactacagctaccccatgccggggccctctggcggggactttgacacctactccaacatccgtgcggccggaggggcagtctgtgagcagcccctgggcctcgagtgccgtgcccaggcccagcctggtgtccccctgcgggagttgggccaggtcgtggaatgcagcctggactttggcctggtctgcaggaaccgtgagcaggtggggaagttcaagatgtgcttcaactatgaaatccgtgtgttctgctgcaactacggccactgccccagcaccccggccaccagctctacggccacgccctcctcaactccggggacgacctggatcctcacaaagctgaccacaacagccactacgactgagtccactggatccacggccaccccgtcctccaccccagggaccacctggatcctcacagagccgagcactacagccaccgtgacggtgcccaccggatccacggccaccgcctcctccacccaggcaactgctggcaccccacatgtgagcaccacggccacgacacccacagtcaccagctccaaagccactcccttctccagtccagggactgcaaccgcccttccagcactgagaagcacagccaccacacccacagctaccagctttacagccatcccctcctcctccctgggcaccacctggacccgcctatcacagaccaccacacccacggccaccatgtccacagccacaccctcctccactccagagactgcccacacctccacagtgcttaccaccacggccaccacaaccagggccaccggctctgtggccaccccctcttccaccccaggaacagctcacactaccaaagtgccgactaccacaaccacgggcttcacagtcaccccctcctccagcccagggacggcacgcacgcctccagtgtggatcagcacaaccaccacacccacaaccagtggctccacggtgaccccctcctccgtcccggggaccacccacacccccacagtgctgaccaccaccaccacaactgtggccactggttctatggcaacaccctcctctagcacacagaccagtggtactcccccatcactgatcaccacggccactacgatcacggccaccggctccaccaccaacccctcctcaactccagggacaacacctatccccccagtgctgaccaccaccgccaccacacctgcagccaccagcagcacagtgactccctcctctgccctagggaccacccacacacccccagtgccgaacaccacggccaccacacacgggcgatccctgtcccccagcagtccccacacggtgcgcacagcctggacttcggccacctcaggcaccttgggcaccacccacatcacagagccttccacggggacttcccacaccccagcagcaaccaccggtaccacccagcactcgactccagccctgtccagccctcaccctagcagcaggaccaccgagtcacccccttccccagggacgaccaccccgggccacaccacggccacctccaggaccacggccacggccacacccagcaagacccgcacctcgaccctgctgcccagcagccccacatcggcccccataaccacggtggtgaccacgggctgtgagccccagtgtgcctggtcagagtggctggactacagctaccccatgccggggccctctggcggggactttgacacctactccaacatccgtgcggccggaggggccgtctgtgagcagcccctgggcctcgagtgccgtgcccaggcccagcctggtgtccccctgggggagttgggccaggtcgtggaatgcagcctggactttggcctggtctgcaggaaccgtgagcaggtggggaagttcaagatgtgcttcaactatgaaatccgtgtgttctgctgcaactacggccactgccccagcaccccggccaccagctctacggccatgccctcctccactccggggacgacctggatcctcacagagctgaccacaacagccactacgactgcatccactggatccacggccaccccgtcctccaccccgggaacagctccccctcccaaagtgctgaccagcccggccaccacacccacagccaccagttccaaagccacttcctcctccagtccaaggactgcaaccacccttccagtgctgacaagcacagccaccaaatccacagctaccagcgttacacccatcccctcctccacccttgggaccaccgggaccctcccagaacagaccaccacacccgtggccaccatgtccacaatccacccctcctccactccggagaccacccacacctccacagtgctgaccacgaaggccaccacgacaagggccaccagttccacgtccaccccctcctccactccggggacgacctggatcctcacagagctgaccacagcagccactacaactgcagccactggccccacggccaccccgtcctccaccccagggaccacctggatcctcacagagctgaccacaacagccactacgactgcgtccactggatccacggccaccccgtcctccaccccagggaccacctggatcctcacagagccgagcactacagccaccgtgacggtgcccaccggatccacggccaccgcctcctccacccaggcaactgctggcaccccacatgtgagcaccacggccacgacacccacagtcaccagctccaaagccactccctcctccagtccagggactgcaactgcccttccagcactgagaagcacagccaccacacccacagctaccagctttacagccatcccctcctcctccctgggcaccacctggacccgcctatcacagaccaccacacccacggccaccatgtccacagccacaccctcctccactccagagactgtccacacctccacagtgcttaccgccacggccaccacaaccggggccaccggctctgtggccaccccctcctccaccccaggaacagctcacactaccaaagtgccgactaccacaaccacgggcttcacagccaccccctcctccagcccagggacggcactcacgcctccagtgtggatcagcacaaccaccacacccacaaccaccacacccacaaccagtggctccacggtgaccccctcctccatcccggggaccacccacaccgccagagtgctgaccaccaccaccacaactgtggccactggttctatggcaacaccctcctctagcacacagaccagtggtactcccccatcactgaccaccacggccactacgatcacggccaccggctccaccaccaacccctcctcaactccagggacaacacccatcaccccagtgctgaccagcacggccaccacacccgcagccaccagctccaaagccacttcctcctccagtccaaggactgcaaccacccttccagtgctgacaagcacagccacaaaatccacagctaccagctttacacccatcccctcctccaccctgtggaccacgtggaccgtcccagcacagaccaccacacccatgtccaccatgtccacaatccacacctcctctactccagagaccacccacacctccacagtgctgaccaccacagccaccatgacaagggccaccaattccacggccacaccctcctccactctggggacgacccggatcctcactgagctgaccacaacagccactacaactgcagccactggatccacggccaccctgtcctccaccccagggaccacctggatcctcacagagccgagcactatagccaccgtgatggtgcccaccggttccacggccaccgcctcctccactctgggaacagctcacacccccaaagtggtgaccaccatggccactatgcccacagccactgcctccacggttcccagctcgtccaccgtggggaccacccgcacccctgcagtgctccccagcagcctgccaaccttcagcgtgtccactgtgtcctcctcagtcctcaccaccctgagacccactggcttccccagctcccacttctctactccctgcttctgcagggcatttggacagtttttctcgcccggtgagtgcatgtggataacactgctgtaccctttccccacatgctatgccaacctgggtctgcctgtcctgggagccagtggctttctccctgctggtcatgtttgttccccactggcctcacttggcccctcccggccacactgggtccccactggccacactgggtctcctctggccacaatccgtccgcactggccacaatcagtccccactggccacacttggtccccactggccacaatgcgtcccccttggccacattcggtctcccctggacacaatccatccccactggccacactgggtctcctctggccacaatccgtccgcactggccacaatcagtccccactggccacactcggtccccactggccacaatccatccccactggccacactcggtccccactggtcacaatccgtccccagtggccacacttggtccccactggccacactcagcctctgccctctccactcccttccctggaaccgctgctccctcctgcgctgacctctgcctttgctctcccagaactctggcttacccatctctgggagtggcttatctttctatggtgttgttcttcacaggggaagtcatctacaataagaccgaccgagccggctgccatttctacgcagtgtgcaatcagcactgtgacattgaccgcttccagggcgcctgtcccacctccccaccgccagtgtcctccgccccgctgtcctcgccctcccctgcccctggctgtgacaatgccatccctctccggcaggtgggccccgcctgccctccacctcccgtgctgcgtgcacacggtctgggttggctggaggcacagccacagtccagctcccgaggcccgtctcagtgaccccgccgccagtatctccagttggaggaggcacacagggcctaggggccaggctagcatgggggccgccctcctcaggcaggctcttgtggccacccggggctttgggccatgaggggtgggatgagccgtggatgggtcccgtgagctggtccaggtgaggacgtgcatgttccctgccccaggtgaatgagacctggaccctggagaactgcacggtggccaggtgcgtgggtgacaaccgtgtcgtcctgctggacccaaagcctgtggccaacgtcacctgcgtgaacaagcacctgcccatcaaagtgtcggacccgagccagccctgtgacttccactatgagtgcgagtgtgagtgcgtcggtggccgcgggattaccccgggggcaggtggagcagagtgcaccgtcggctaggctggcagaatggggcatggtggggcacagtggggtgcagtggggaatggtggggcatggtggggcatggtggggtgcagtggggcatggtggggcatggtggggtgtggtggtggtgtttgggagatcgctggcatcccttcaggaaaccatcatgcaccatgctgtcttgggcctcagtggtgcacgtcgtgagagctgttagtatgcaggctccgtgtccacagggctgaaaatgctgacacagcccaagggagaggcagcagaggctggtttgctgagcttctctgcacatcagcctgtgtggtttgaaagggaccctgcccaggggcttctggggccaggagaagctcaggatggaagcgggagcccagaggagcttttgtctcctgggtcctaacagcggcttccatcaccgtgcgggacccaccgctaagaggtcacggcgttctcactcctccccatgtccttggcccagggctgctgttccaaaccgccacaagctggggagcttatacaacagaaacccactctccgtcctggagctggaagtctgagatccaggcgggcaggggatagactccctgctgagggtctggggaggtccttcctgcctctcccagctttggggactccaggtgtcctttggctgtggctgcatccctccgatctctgcctctgcctctctgtggcctcccctctctgtgtctgtgtctcttctgtctcccgtaaggacactggtcattggattgagggcccacccagctagtccacgatgatgtcatttcaagatgcttcccttaatcccatctgcaaagacactttctcccggcaaagccacatgcggaggttctgggatagccatagattttgggggaccccattctacacactggacccatttttatagacgaggcagctgaggccccaggggcttcagtggctccccaaggcggcagtcacagtggtgacgctggctgccatgacgcctggggagcgagggcaccaccacggagcctgccagcccgtccatctctgtcccgcaggcatctgcagcatgtggggcggctcccactattccacctttgacggcacctcttacaccttccggggcaactgcacctatgtcctcatgagagagatccatgcacgctttgggaatctcagcctctacctggacaaccactactgcacggcctctgccactgccgctgccgcccgctgcccccgcgccctcagcatccactacaagtccatggatatcgtcctcactgtcaccatggtgcatgggaaggaggagggcctggtgagtccaggctgcgggtggcacagtgttggcccagtcccaaccgcacctgggcaggccgactgcaggccggggtgacccaggtgccgcagcgatggcccagtgcccaagacagctcccagggggcagggaaggcctgtggagccgcctaaggccgagcgcaccctgtggcctaaatgcagccagctggagactccaggcccccagggaagatctgggctttggggtgggggatacacaggggggtctctgcacatggaggcagagccccaaagagaagccctgctccccgagcccacctggcactgcctcccagctcagggttcccctggattcccccagatcctgtttgaccaaattccggtgagcagcggtttcagcaagaacggcgtgcttgtgtctgtgctggggaccaccaccatgcgtgtggacattcctgccctgggcgtgagcgtcaccttcaatggccaagtcttccaggcccggctgccctacagcctcttccacaacaacaccgagggccagtgcggtgagtgggcggcgggtcctgccccggccagggctgctgctgggcctgacaacccagtgagcataggggaagcctggggaggggaatgagtgggggaggggggtgggggctgtgaaaggctccccagattccagccccgcggtgacgcccccactcccaggcacctgcaccaacaaccagagggacgactgtctccagcgggacggaaccactgccgccagttgcaaggacatggccaagacgtggctggtccccgacagcagaaaggatggctgctgggccccgactggcacaccccccactgccagccccgcagccccggtgtctagcacacccacccccaccccatgcccaccacagccgctctgtgatctgatgctgagccagtgagtcctcccctcgggggttgcaggccctggggcgcccccgcccgcccgcatgcacgcacgcacgcagctccctggggctgggggccctccgtcctgatcgctttgccccacagggtctttgctgagtgccacaaccttgtgcccccgggcccattcttcaacgcctgcatcagcgaccactgcaggggccgccttgaggtgccctgccagagcctggaggcttacgcagagctctgccgcgcccggggagtgtgcagtgactggcgaggtgcaaccggtggcctgtgcggtgagtgggggcggccccgggccccccagacccctcggcctctctgagtgtcctgtgcggtgagtgggggcggccccgggccccccagacccctcggcctctctgagtgtcctgtgcggtgagtgggggcggccccgggccccccagacccctcggcctctctgagtgtcctgtgcggtgagtgggggcggccccgggccccccagacccctcggcctctctgagtgtcctgtgcggtgagtgggggcggccccgggccccccagacccctcggcctctctgagtgtcctgtgcggtgagtgggggcggccccgggccccccagacccctcggcctctctgagtgtcctgtgcggtgagtgggggcggccccgggccccccagacccctcggcctctctgagtgtcctgtgcggtgagtgggggcggccccgggccccccagacccctcggcctctctgagtgtcctgtgcggtgagtgggggcggccccgggccccccagactcctcggcctctctgagtgtcctgtgcggtgattgggggcggccctgggcccccccaaccccttggcttgtctgacacctctctgtgcccacagacctcacctgcccacccaccaaagtgtacaagccatgcggccccatacagcctgccacctgcaactctaggtaagtacagggatggctggtgccttccctgccacccaggcctgcctgaccggtctgggggagcaggaggaggccagagggtgtcccactgtgggccacagatctctggggtgcccgagcccaggactccttggaaaacatcccctgctgctcccagatgccttagagacagagtcaggcagggggcgcatccctggccacgcctggccccgcatccccacctggccccgccaccgagccccacccatccccgcccatacttagccccgcccacccccaccccagccccacccgtccccgcccccagccccgcccaccctgagccccgcactccacccattcatctccttccctgctccccactgcccatcctggggactcacgtggatgacagtggaggcctcctggatctctaggtctcagggcctctcttgtcatcctgcaggaaccagagcccacagctggaggggatggcggagggctgcttctgccctgaggaccagatcctcttcaacgcacacatgggcatctgcgtgcaggcctgccgtaagctccgccacctgtggcgggatacgaccctgggcccgacccaagcacacacagggtgggaggagccgcccaggaccatgatgtgctctcccctctccccagctgacccccgtgacctgttctgccccaccagagcatgggatggccccagagtggccctgaaccctgcagagcccccacggtcccctgaagccccacagggaggctctgtccttgagtgatcctgtgatggtccctcccctgagccctgcctcccaccaccatggacgaggcttccatgcactgacagctgggctcacggtgccctggcctgagctccagccacatctgacaccccaaaagttctccagggccttccatcccggggggaagcaggctccaggcctgagagcacctcccatggccagaggcccctccgcctgcaaactcagcaccctccgtgatgccatgctgttttctttccagcctgcgtgggacccgatgggtttcctaaatttgtgagtggctccacccccacctgccctaccccaccctctcgcgagctgagggagggagggaaggagcatccccatcccacagggcagctgtggggcgcccgagtgtgacgtggacgtgccagtggctggtgtgcgcttcctgccccatcactctgggccactcgggtaccagcccgagggagggggtggctggacagatgcccagggttgacctgtgtctgtccaggagccctcagggacccccttgatccattccagcccggggagcggtgggtcagcaactgccagtcctgcgtgtgtgacgagggttcagtgtcggtgcagtgcaagcccctgccctgtgacgcccagggtcagcccccgccgtgcaaccgtcccggcttcgtaaccgtgaccaggccccgggccgagaacccctgctgccccgagacggtgtgcggtaagacgctgcagagcagaggtgcccggcatagggtgaggggggacagagccggtgcccaccaggggcctgtgggttgggcacaggagagcagaggagagccactgtgtcctggcgtgaccgcggcaggaccactcggcagagatggcctccaggtgcttcattctcctcctaacgatgaggctggtgacctctggcctgcccaggagtggcccagggacgtgggaagcagcggggaggtggccaagcaaggggcctggagggagcccccaggggctgtgaagcggtcaggtcctcggggaaaagcacgcctgcgacttactctgggaacaagtggtcgggaggaggagtgagcagcgcccagacagtggcctccatcctcccgcagtgtgcaacacaaccacctgcccccagagcctgcctgtgtgcccgccagggcaggagtccatctgcacccaggaggagggcgactgctgtcccaccttccgctgcagtgagcggggctggggccgggctcctgggtggcctcttgctgggggtgggggagtgcaggatggtgggggcgctggagcacatgctccccaccacttgtcgagggcttagctccctttccttccaggacctcagctgtgttcgtacaatggcaccttctacggggtaagggcacagcagtgggtgggtgtggccctggggcctgaacatgtgtgtgggatgccccggggctctctgagccccactccttgtcttgacattcctgccctgagggccgatccgcacaggggccctggacacgtcagagctgggacatgcttgggactcaggggcaccttacgtcgacagccatgagctccacaactgctgcctctgagaggtcccttcaggggctcccagcaacagcctgggggcagcacacactggcctggggtccccgcctgcccgcccagattcctacccgcccggattcctgcctgccagattcctgcccccatggggtctctgcccacccagattcctgcccacatggggtctctgcctgcccagattccctgcccacctgtggtccctgtgtgcatcagctccctgcctgcctgggtccatgctcagccaggggtgcatctatgctccatctgaggaaggaacaactccctgcaggccccattgggtcatggggaggggtcctggccctgttgccccaccagtgccctcagtgccaccctcccaccccttgcaggttggtgcaaccttcccaggcgcccttccctgccacatgtgtacctgcctctctggggacacccaggacccaacggtgcaatgtcaggaggatgcctgcaacaatactacctgtccccaggtgagacccgaggcacctgcccccaggtgagcccccgaggcacctgcccccaagtgagacccgaggcacctgcccccaggtgagacctgagtcacccgcccccaggtgagcccccgaggcacctgcccccaggtgagtccctgaggcacttgcccccaagtgagacccgaggcacctgcccccaggtgagacccgaggcacctgcccccaggtgagacctgagtcacctgcccccaggtgagccaccaaggcacctgcccccaagtgagacccgaggcacctgcccccaggtgagcccacagctgctgggcagacccagccctgagtcacttatcctggctccctggggttctctagctcagccattgctggggtcttgtttgtttccaaagggagggtatgaagtaggaggataactgagggggtctgggggtgggacaggacctgcaggctgctggggacaggggctgaggtcaggttccaggaaggcaggggtaggcagagagaaggtgctggaaactggggtgaggctgagccgggataactgagtgggggcaacttcttcgggtataggcccaggcagggacagggctaaggggtcctggaccactggggtgtagacaggagggcaggctgggccggggcatgtgctggaggagagggttagggcctgacgcccctcatgtccccacagggctttgagtacaagagagtggccgggcagtgctgtggggagtgcgtccagaccgcctgcctcacgcccgatggccagccagtccaggtaacagcagaggcatgtgggggcaggtctcagctccctccctggagaccctcacccccaatggggctctgcacaagaggtaatccctactcagcttccacactcacccttgcatttcagctgaatgaaacctgggtcaacagccatgtggacaactgcaccgtgtacctctgtgaggctgagggtggagtccatttgctgaccccacagcctgcatcctgcccagatgtgtccagctgcagggtgtgtgctggaggccctgcccctgcctgggagtccttgtccatcagggaggcccaacccctgtctgggatgccctgcacagcagggaggccccacccctgctggggaggccccacccctgcctgggaagccccacccctgcctgggaggccccgcccctgcccgggaggccatgcccctgcccgggtgggcccctccccaggaggccgcacccaccagggaggccccgcccacagccctgccccctgtctttggcccccaccaggggagcctcaggaaaaccggctgctgctactcctgtgaggagggtaagtggaagccaccttcccacaccagccctccagctccagcccgtcgccacccatccattcctgcccagacatctgcactaggcagcagtgggatgcccgcgtccagactccaccctcggtcctggagggccatgggaggggtggtcccatggggagggtcggcccagcaagtccaggccctcagagtgagggtccagtggggctccacatctgcctttcctcctcccagactcctgtcaagtccgcatcaacacgaccatcctgtggcaccagggctgcgagaccgaggtcaacatcaccttctgcgagggctcctgccccggagcgtccaagtgagtgggctcctggccctgtgccaagagcacctgcgtgtggtgggtccgccctggcccgtcagctggctggcagcctgctctgggtcaggagggcctacgccagctccaggaaggagggaaggggctccccagcagggctccccctctccacgtccattggcagaaagcctggggccgctctcctagccaggccagggcccggctgagccgagccacatggcacagagctccccgctgcgaacccaggtccaggtgtccccctggggagggtgggtggaaccagagccttctgtgaagccccccatggcttgccactgtggttggctgtcagcaggaggggccagaagggttgacccttagctagaagaggcaggaggaagggtcaagggctgcttagggtcagcaggattggaggagctggttcagacaggggaagtgcaggccacagaagacagagccgggagccaagggaccctgggggcccagagctgccccatcctgagaaggtgaagcctcacgtgcccacagagcaggccactgtggacagaagggggcggccgtctggcccaggaccccagaggcccatgtgtcaccatggctgggcagagaaacggcggggccaaggtggctgatgtgagggccaccctgcgtccacaggtactcagcagaggcccaggccatgcagcaccagtgcacctgctgccaggagaggcgggtccacgaggagacggtgcccttgcactgtcctaacggctcagccatcctgcacacctacacccacgtggatgagtgtggctgcacgcccttctgtgtccctgcgcccatggctcccccacacacccgtggcttcccggcccaggaggccactgctgtctgagaacgttctgcctccatccccatgctctgtccacctggagccaggatgtgcattgtctgatcatgaaaaccttgggcctcctctgcggagccccccggcctgtgtgtggcaccccgcgctccgtgctcctgctgcccaccccgtgggtgaaaccggccccagaagggtgaggggccagcaggacccctttcgggagggcgccactcaggagtcctaccctgggagagcctgtggcccaccttggccttgcccctccctgatgtcactgggacgccctggaacaaactaagcatgtgcgggcctatgtgtccctgccacggccggagcgcccgcgcagcacggattccagctggccacgtccggccgctggggcagacaggctggtccaggcaaggccagctgctgccaggaagctgcgacaggcaaggcggccgcctgtccatgcctgctgcagggtaactcagggctgaggtcgcaacggccaggtcagagaggggtcagcatcccaaagccccctctgctcaacccagcccagttttgcaaataaaccctgagcattgagtacgtt

SEQ ID NO: 740 - DNA, 28476 bp, Homo sapiens
ataatcacgacacattcaacacagatgtgagcgtttggagagagcttcagccttcagcacaggcaactgtgttctattcaccgggctgtgctcctcggaagggctggtggttcctgtaaaagtttgtgctccccgcgcctttccttccttccctcgtctttggcgcctgcgggcaccgggagtcctgggagagggaggaggaacggcgaatcggcggggcgtgtccttcacgccgccccgtagctcggggccgaagctggcgcagcgcgcgactttttgaaagccaggagggttcgaattgcaacggcagctgccgggcgtatgtgttggtgctagaggcagctgcagggtctcgctgggggccgctcgggaccaattttgaagaggtacttggccacgacttattttcacctccgacctttccttccaggcggtgagactctggtaagaggagctttttttttgcgagccctggcgggggccgagcccggagccgaggcctctgcgggggctttcgtgacaggggaggatctggttacagccaaagaaggattttggcagccagccccttgtgagcccctggattggggtaaacagtctgacctccacccccgaaccctgctgagcgtgtgagatgcagaggacctgagagtcatgcggcccacactttctctttgcttccccttggagtttctacatctactttgtttctcttttctcctttactttttctctcattcttttaattttccgttttctgctgcccgtccgcgtcgtagctttgtcagtagtgtccaggtatttgttgagtcccagggtcccaggcttagggcccaaaggtcactgacgtttgacccggtaaatctgtagattagcttgcttgagcgctgctcactttaatgctgcctcttaaacagtacttgattgttaaaaatatcttacgtattccacagagtatgaaattctgctcacggtcatcctactgccatttctaatttatcttcatctaaatattcactgttttttttgctgtcatcttcatgagaaccttgtgatttagaattagtatggttatttaacaattaatgttaagaatgcatatacaatacataacataatctgaagcagagtctgggctactggccaaaagctatctgtcagcagttaatgcctaaacctgagtgtgcagtctggaaaaaagtggccctcagacaactgtgaaatggataggacatggtacattgaggtgcaaatagcttagagtagaaggtgggactcagtcgtaagagaacataatgaaatgttacgacttctgtttaaacctagttgtttttagagataggttttcttttttaaaacgtgctgcttctgaatatcaaatcctccgtagagtgagcgggaaaaggcagtgagactcataaggctcatcataagatttccaggacactctacgcgccagggttttctgcatcctactttgttggcacctccttggttgctttgtttttcatttctcatgcttggatgccctagggctcacccctcttctctctacagttactccctagatgatcttacctagtctcttggctttaataacgtctgcgtgctgccatcccacaaacttaaatcttcagcttgcattctagatccgtatccacccacctatttgactcctccacaaaactctccaacagctttctgtttctcagtacaagctgaaatcttgactgtgactacagttgagtagaagtcacagtcctgtggctacaatgctctacttgacttgccagtccctaccctcagcctccctgactttgtctcattctcccccttgctagctcgcctcttcgtgaagatttctgcctcaggtctttgtatttcttgtcctctctctggaagactttcactagatacttgcttgggcctgctccctcacttccttcaaatgagtttctcaaggagacctttcttgaccactttaaactcaaatattaagccccttcccaaggccttctgctcccttcactgatatatatttcccctgaaatagtatatgtttatcttcatacttgtttgggtcttgtttgctgctctatttccagagtgtagaacagtgcactgttagagcacatggtatgtgctcgaacagtgcactgttagagcacattgtatgtgctcagtgtgtgcatattgactgagtgaatgaagagtagcttcacataggtagatagaaatcttagaagaagctggatgtggtggctcacgcctgtaatcccagcactctgggaggccaaggcgggtggatcacctaaggtcacgtttgaggccagcctgaccaatatggtgaaaccccatctctactaaatacaaaaaattagccgggcatggtggcacatgcctataatcccagctacttgggaggctgaggcaggagaattgcttgaacctgggaggcagaggttgcagtgagccgagattgcaccattgcaccccagcctgggcaacaagagcaaaactctgtctcaaaaaaaaaaaaaaatcttagaagatctctgaggtgccacatcacagcatcccatggggaaagataacacagatggaagaaggggagtcagaatgacatggggaaattatttccgaagtagaaatacctcctgcaacccactctgctaaatagtttatcctttcccaaagttctgaaactggtttcagaaattctgctgttcctaccgtcaagttaaatgggtcacttcataaaattattatactcttgacaaacacatgtaaaggggctcttcggtgttctcaggacaggtaaatctgaagacaatagtgattgtagctacattttaaacaagatgaacaagcttgtcattaatagttaaagctgggcctttgagatgattttcttccccttagtacagtttttaaagatgctattattaagggctctataaaaaatttaagcaaatctgtctgcctcccaactttttatagacaaatgagcttatagacatgtaggaacagttttgctttataataaataaatctaataggaaacctaattttttaaaaagaaatataatttttaaaataaaaaaattcttaaatatgttacgaagaagtaaacacattgagttgctttgtttatatatgtggtatgtacattttcttttcttccgttcttttttttttttgagatggaatcttgctcttttgcccaggctggagtgcagtggcacgatctctgctcactgcaacctccgcctcccaggttcaagcgattcttctgcctcagcctcctgagtagctggaatgacaggtacacgccaccacacctggctaatttttttgtatttttagtagagacgaggtttcgccatgttggccaggctggtcttgaactcctgatgtcaactgatccgcctgccttggcctcccaaagtgctgagattacaggcgtgagccaccatacccggcctcattttattttcatagacaatttttataaccatttattgagataattaatgtatcataaaaatccaccttttgaaagtgtaaaattcaatagtttctagtatactcagagatgaatatattaaaccattatctggttttagaaccttttcttcaccccagaaagaaatcccatacccactggcagtcattctgcattctttgtctcccagtccttagtaactattcagctatttttgtctccatgatttgcctattctggacatttcctaaaaatgggatcattggacgggcacggtggcttatgcctgtaatcccagcactttgggaggcccaggcgggcattatcacaaggtcgggagttcgtgaccagcctggccaatatggtgaaacaccgtctctaccaaaaatataaaaattagccaggtgtggtggtgggcgctggtagtcccagctactcaggaggctaaggcaggagaattgcttgaacctgggaggcagaggttgcagtgagtcgagatcatgccactgcactccagcctgggcgacagagtgagactccatctaaaaaaaaaaaaaaaaaaggatcatcatatatgtagcctttatgtgtctggcttctttcatttagtataatgttttcaaggttcattcttgtatatatcagcactttattcctttttatgactgaataatattccattgtatagatatgccacattttgtttatccattcatcatctgatgcagagttctgttgtttctgccttttggctgttatgaataatgctgcttgaacagtttccttaaaggatataagagagctgttaacaactgctcctgggaagtataacagggagacatactgtttacttttttgtactaggtgattttttttttagctaagtgcatatattactttataatgaaaacaaaaatacccaatcactaatattatgatgggggtaagtaattgtactttttggttttagtttcctcattttaagtaaaattgggctaaatgtttgttgaggtcctttttagctctcaaattttgtttgtgataacgtgaacgataatgttataggcttttttttttttttgagacggagttttgctcttgttgcccaggctggagtgcaatggcacgatctcggctcaccgcaacctctgcctcccaggttcaagcgattctcctgcctcagcctcccaagcagctgggattacacgcatgcgccaccacgcctggctgattttgtatttttagtagagacggggtttctccatattggtcgggctggtctcgaactcccgacctcaggtgatccaccgacctcaggtgatccacccacctcagcctcccaaagtgctgggattacaggcatgatccactgcgcctggctattggcatttttcttcatgaatgagagttgtattctttatatctgctgtgtaacttgcaatttgttttcatcgtaggactgagagtggctttcacaatggaagggatcagtaatttcaagacaccaagcaaattatcagaaaaaaagaaatctggtaagatagcagatgtaagatttttttttttactattgttgtttctcttagaaatgtcctagtattatttagtttgatcctttattatcggtcacttagaaactttaatgtaactcccctttatgatgttaatcttaacaaataagacttattttataggccacggtttgatcatctctggactaattttattgacaatctaacaggtttggaggctctccctgcccaagaatcaacttagcttgacccattaaggaactgctttacctttctccctctcatccatacattgctcttgtgagggaaagatattttccaaggcaactcaatggacaaaggaaaatcttttcaacaaacacctagatatccacgtgcaaaaaataagccttgacccttaactcctattatataaaaaatagctacaattaaatttctagaaaataacatgagaaaatattctgttgtccatttctagtgacagatttttcatattgaccttgtatcctgcaaccgtcctaaactcacttattctattagctttttaatagattgcttgggatgttgtatatggttggtcatttgtggatgaagaaagacagttttactttgttccccagtctgtatggctttgtttcttttactttttttaattgcactggctccagtatgtttttgaatagaaatgttagtggatatacttgccttgttcccaatgtattatgttagatgtaggtttttcacaaataccctttattagtttgaggaatttttcttctatttctagttattatcgtgagtgggtattgaactttgtagagagctttttctgaatctattaaattttcttttaaaatctctcaatgtggtaaattatgttaattttcaagtgttaaactgaacttccttgtgtaaagccagtttggtcatgatatattttatatattgcttgatttgctgatattgtctatattcatgagggatattggactgcagttgtctttttgggatatctgtctagttttaatattaggttattctgtattcataaagatgagaaatgtttctctttttttaatagaaatatctttttctttaactttgtgtagaattggtattattcctccttaaattggtggaattcactagtaaagctatctgggcctggagttttcttagtaggaagagtttaactgtgatttcacagttaatagatatagggctattcaagtgatctcttattttctttgtgaattttgttagtgttttttaaggaatttgtccatcacttctaaattttcaaatgtactggtgtgaagttattcttgatacacccttattaaccttctagtgtcctttttcatatctggtactagtattgtatattttcttaatttttttccttaatcagtctgacttgaggtttatgtatgttggtgaatgttgcatgcacttgaaaagggcatttttttctactcttactgggtacggtgttctacaaatgtcaatgttctacaaatgtcaatgatattctgtatactttttatattaattatgagagaagagagttgaagtttccaactacaatgtggatttgtctgcttccccccacccccaatttctatcagttgttgcttcatgtattttgaagctttgttattaggtacatacacatttaggatggttatttcttttctttttcttgtttttttgagtttccttttgtcacccgtaatggagtacaacagtgtgatctcggctcactgcaacctctacctcctgggctcaagtgattctggtgccttggcctctggagtagctgggattacaggcgtgcaccaccatggccggctaatttttgtattttcagtagagacaggttttcgccatgttgggcaggctggtctcaaactcctggcctcaagtgatccactctccttggcctccctttcaagtgcatgcaacattcaccaagacacataaaccacaagtcagatcccaaagtgttgggattaccatgcctggcctaggatggttatttcttttgatgaatttataccttaactgttacgaaatacccttcttaatcctcagtggtactctttgttctggagtccactttatgtgatagtaatggagccactccagatttattttgatttgtgttttaatgatgtttttcaaccctttactcttgccctatttgcgtctttatatttaaattgagtttattataaatggcatgtctcgtcttgtttttatccgttctgacaactttaatttcctttaactggactgttttgccattagctacatgtggctatttaaatttggttatttaaatttggattattaaatgtggttatttaaatttggatacaaattaattagaattaaataaaattacaaattgagttcctcagttgtattagtcacattttaagtgctcagcgctcagacagcacagatatagacatttccacatggcagcatgatgtattggacagctctgtttagaccatttatactcaatgtaattgtctattgttggatgtaaatcggctgttttgctattgtcccatagctcattgatgatttttttctaacctttttctctctttgcttcatttttgatagtttttgttgctctgtcttaagatttagttattcttctgctctaagatgatgttattcttatccattgtatttttcattcctaagcttctattttgtctttttttttccgttatgctcagattttcctttgtatcattgagcacatttttaagatttgtcttaaggttcttatctgctaattttgccattcctgtcattttttttttttttttttttcttgagacagaatcttgctctgtcacccaggccggagtgcaatggtgcgatctcagctcactgcaacctccacctcctgggttcaagcaattatcctgcctcagcctcccgagtagtcgggattacaggcacgtgctaccacgcccagctaatttttgtatttttagtagagacagggtttcgccatgttggccaggctggtcttgaactcctggcctcaagtgatccacctgcctcagcctcccaaagtgctgggattacaggcgtgagccaccactcttggcctcctgtcatcttatggtatgtttctattgattgattgattttttaattttttgagatggagtcttgtgccctgtcgcccaggctggagtgcaatggcgctatctcagctcactgtaacctccgcctcctgggttcacgccattctcctgcctcagcctcccgagtagctgggattacaggcacgtgccaccacacctggctaattttttgcctctttagtagagacggggtttcaccatgttggccaggctggtctcgaactcctgacctagtgatctgcctgcctcggcctcccaaagtgctgggattacaggcgtgagccaccgcgctaggcctctattgatttatttttctcctatattggtcatattttcttgctgctttcatgcctggtactttttgattgggcagtagatattttgcattgtctagtactggattttgttattcctttaaagagtgtttgatttagttatggtctgaggttaagttacctgcacattagcctgttccttttgagactggcttttaagctttgttttgaatgtttatctggggctaaactttagctgtactatctagttgtgaccctttagaggactttactatgtgttacagggttaccatcctctagctcatggtgatatgaagtgttcctagacttgtatgatctctggtaattgttgagccaattgctttcctctggtgctttcccagctttggggcatctacacattgttatgtgcggataagtacttggccaaacactcaaagagaaactgttcagatctttggagtgctctctttggagctctctagttctctgctccacaaattctagccgcctagtccttcttgacctctgatctctgtctcttcaatgtgacaggacttctggattatgtgacctctgtcctgcagtctggaaactgccttcaagcagtaagttagggcagtgatagggcccacctcatttgtttctcttctctcaggcatcacaacactgctctgcctgttgtcaagtgtctgaaaacaattatattttgtctagttttctagttaatggcgagatggtaactctaggagcagttaattgtccaggagtagttaattatttttcatgagcagaagcagaactccatcttttcatctttttttttttttttttttttttttgagactgtgtcttgctctgtcacccaggctgaacacagctcactgcacctgcacccttaacctcctgggctcaagtgtttctcccaagtagctgagaccacaggtgtgtgccatcattcctggctaattaaaaaaattttttcgtgtgtagagatggagtctctttatgttgcccaagctggtctctactgggctcaagtgaccctcctgccccggactccaaaagcgttgagattataggcatgagccaccacatccaacccctttatcttttaacaatgttttaaaaatgtgaaaacagttcttagcttgtaggccatacaaaaacaggccatttcccaatctctgcttcagagttactgtaggataaaactccaaaagtaggcttggtcaaaagatacccatttaaaattaggatatatgttgtcaaattgctctccaaaaagactgtgccaattaatactcttggcagtagtatattgagaatgttaagatgctttatttttattttttattaattttattttttatttctctgacatttagtattatgttcaactccaactataaatatcccggcctctccgtttatgcagaagcttggctttggtactggggtaaatgtgtacctaatgaaaaggtaagtataagatttcagattaaccttttttcatgcaactataattctactgtacttggagacaaagaagtagtctgaaaattccagtatttagattcggttgtctgctcctgatcctggctgatggctgtattccggtccctagacccttttgtaactttgcctgtagctctgcctctgcttttctcctagcttcctcctgatgggttattaaaggggaagtcatttactttttaatttttccttggcttccataagaaggggaagtggcaggggaaagggttcctttgtggtaattaaaccagattcttcatgagaaaacctcaaagaggaagccagtattgggtgatgtcagtgactgctgtcttttctgcagcgttgccctcctaagatatgctcttctaaaagaagtaaaagattttcatttcttatggcattgttattaagaagggtaaatacatgattttaaagtaggaatattgtgttaagaaaaatgaaataatcgaacaagtatggtgccaatatagctgtcaacaaagtgtttttttaaattacttttttattattcatatatttttttgaaacagagtctcactctgttgaccaggctggagtgcagtggcacgacctcccaggttcaagcgcttctcctgcctcagcctcctgaatagctgggattacaggcgtgtaccatcacacccagctaatttttgtatttttagtagagacagggttttgccatgttggccaggctggtctcgaactctggcctcaagcgatctgcccgccttcgcctcccaaaatgctgggattacaggtgtaagccaccatgcccagcccaaaattacttcttttaatcattactctgtacctagtttcatgtttattaagtggcaaacaactacatcaatatatattccttaatgcattcttggaatcagtctaactagtccaaccctccgtatcttagcttcatctaggtttacattgtttccagatagaaatgctttctttaataagaggctaattaagaataatttagtaattatatacaatgggtattcctgaagcatttttgcagtttaaacattttttttgtatgtttgtatggtattgttttctaatttgttttttagtgttaactcctattttgaaagaaaaaaattctcacaggtttatggctagtttcatttttttccccctttttaaaaaaagtttttaaatgtaaagtgtttttaacaaagttacactgtatgtggtttagtcaaaaagcttcaaatagctgatctttttttttttttttttttttgagacggagtctcgctctgtcgcccaggctggagtgcagtggcgcgatctcggctcactgcaagctccgcctccctggttcacgccattctcctgcctcagcctcccgagtagctgggactacaggcgcccgccaccacgcccggctaattttttgtatttttagtagagacggggtttcaccgtgttagccaggatggtctcgatctcctgacctcgtgatccgcccgcctcggcctcccaaagtgctgggcaaatagctgatcttgaagaacagcagtgcctgcctgaccctacactcctcctgattcagccctgtcaacctgggatttcttttatccataacctgcaaatttcctatgcttctctgctgaattatatcctgtgtttttaggtatcttgtgtcttattatttcttgatttacatcccgttttcatttaggacatctggtagctccccatgaatcggtgcacagaagatatatttttttgagaatttgcatttccaaaaatgttttcattttactcatacttgaatggccctttttggttttctgggttacaattctcatttggaaacaatttccctccagaattttgagaatatcagtcactgacattgttttttttctagcttacactgttgctgttgagaattatgaagcctttttgactgctaattcttcatatgtaatccgttttatgttatctgtcccccccactgtcctggatcctggtatgatcttctgtatgtcggtagcattctgaaatttcacaatgacatgagtggatgtggggatcttggaatctgaatagttcctgttcttaaatttctgagacattattttaaaaattactttgttgatgattttcacctctttttctctgttctccatctggaatccaattatttgaatgttgaacttactgatttctcatctacctcttttttgcttggttttcttattcgctatcttttttctgagatttccccagctttatctttcaacaattctattgagtttttatcttgtttttaattaattatctttttaaaaatagcatctttagtctcttggagtgctagaaatgttcggtatctaggtgttgataacacaggtatatgcacatgtaaaaactcattgagcatttagtatgcatatggtgattaattattaacctgcttctgtattacaggttctcaactgacagtaaacctcaggctaaagacttgttttataccttccaaagctagtctaccatctttagaagctggggaaggggggtgggcagctgccagttggtacagaattaaggagggtatctacgagtccacctgttttttaccattattatttagagacagggtctcattttgttgcccaggctggagtgcaatggtgccatcataactcactgcagcctcaaactccttggtttgagcaatcctcctgcctcagcctcccaagtagctgggactacaggcgtgggccaccacatgtgacttttaaaagttttttgtagagaaggggtctcactatattgcccaggctggtctcaaactcctggtctcaagtcatcctcctgacttggcctcccaaagtgttgtgattatagttgtgtgctaacccttccaggcctacgtgctttttaaataacttgcaagcagttcattggggctaagtcagttactttcttctgctttccagcttctgaaattttgttgctgttgtctcttctgctgttatttccattcttgctggcttgtatgtctaaaaaatatccatttgctattatgttagtgggcttggaaaggataaaaacaatgtgtatgtttaagctacaattttaacccagaagtctatattttttttgttaaatcaagtttgcatttcttggttaaatccaacatagttttgatgtagtatttttaaataaactgatggattcagtttgctaatattaaagtttatttcaatttttgcatctgatataagtgaagttggcttgtggttttcctttttctactgtcccttttgattttttaaaattaaagttatatgagactcatagtaccttttctgttccctggggaaacagtttgtataagattgaatggtaaattctttgaaagcttagtaaactcacctgtaaaatcatctgcactttgtatttctagtaggaacattttaaactggtgattaaatttcttcattcatcagttttcttagatttttctaagtctttgaccattttgtcttaaatgattgcataaagattttatttacttacatattttttctcttgtatctgtagttttgtttccatttttatttgtgatattgtctttattttttcttgtgtaatctcatcagaaatttgccttttttctattagtctttttaatgaaccagctttttgcatggttgagtattcagatttcataaatctattcttattcgatagattagaatatgttatggaaaaggtgaagattgacttgtttactaaattctaaactttcaagagctaaactttcaacccttgaaatttgaaaaatatatttttcataataaaatgatatgcaggtgctcatcattatcctcaaatgctgctgttatttaaaactggaggtttaagaatagtttagatcaacttacggatgatagatgtacatgaattaagaaatcttgtgatccttttagtataggctttttgattaaacaaaaaaggttctgcagtcttagagctatacctgtgagggagtccaaagctaaacagatctttgattcaatctcttgttttgtgttcttaccattaaactttctgtcttaaacttctgaggctctttcactaggttttgtgctgttatgctgcatatacttaagtattttgtgatttgctctactcataaatatctaccacctcaggtaaacctttccctgactttattttacctatttaggccttaaaacatttataccttaaatatttgtaaaatggctgaatcttcctagaaaatagaaagtttaaaattttctcatttgtatgttcatcattatctccttaagcacatatctttgagcatgtggtaaaaggtataaggtgaattggtcagtgtaggggagcaataagaacagcatgctgttctttggatgatgatatatgggtaaaatgttcttgattatctcttctttaaatttcctaatgtttttttcttcaggatcctataactcatctctgatacatataattaaatatttaataagttgtagtccaacatgctcaaatggaaaaattggaaagttacaattttcaggtttaaagtttgtaacattccatctttacccttcaaattcttttcatcctctcccttccacagtatagatagtaagacttgttttagtatattagatcttacctcccaattgaaatggaaatgtagcagaggtgttcatagtccaaactattttaaattctgtttttaaaagcaaatttctttcaagctttttcccaaaaatttggaagtcattttaaaaagtattgtggttttattgttttctatcctttttaaatgaatttttttcttagatctccaagaggtttgtctcattctccttgggctgtaaaaaagattaatcctatatgtaatgatcattatcgaagtgtgtatcaaaagagactaatggatgaagctaagattttgaaaagccttcatcatccaaacattgttggtacgtttaaatttggtagcagtatctggtatattattttgtttattcagaaacagcttatatgctctcttaactggtttcactaatagaaatgaagaggatggggctggatatttaatgggtatcaaattaatgtgattggtctaaaataaaaatttgcatatagtattttttgatgcctaagtatataaacttcatgagaacagatataataattatgttgctagttctatgaagattttaagaatataaaatgatcttcatttagataatttaaatccatttaggtaatttcctggatttcatttttcatttttaatacaagtagggctggtgaaactattatatttagggaagcaaaggaaaataaaagtattttaatttgtggtactactggcaaacactgaaggcattttaaatgagatctactgaattagtcttgtaaatagtagctgtttcattgtatatttgtcagcgttagtccagatccatattttcaatcacgttactataaaggacttaaatattattgttcttctctatattagtgaagaaatgtcatgttttctttaaggttatcgtgcttttactgaagccaatgatggcagtctgtgtcttgctatggaatatggaggtgaaaagtctctaaatgacttaatagaagaacgatataaagccagccaagatccttttccagcagccataattttaaaagttgctttgaatatggcaagagggttaaaggtaactatgtcattatattttaaatgacttctgtttttgttcatattttaaatgaacaaataatcactttgcaggacatctttgaatgtggatggatattgttacttgtcagttccaaaaaggggttagcggaaaacaaaatagaggcttacatttctgcttccaaattacattcatgtgtagcttaatatgttctgagaaatgtgtcatttggcagtttcatcactgtgcgtgcggacatcatagagtgtacttacacacacctagatggtagagccaactacacacctgggctatgtggtatatatagcccagttctcctaggccacaaacctgtatagaatgttactgtactgaatactataggcagttgtaacacagtggtaagtactgtgtgactaaacatatcaaaacatagaaaaggtaaaatcaaaatatgatattataatcttatgggaccaccgtcgtatatgttgtccatcattgaccaaaacatccttatacgtacatgtggccctagtcattcattgtcccacatggtctcaacaatttatgtatgcttcactgaagattccaaaattatttctaaaaattactagactagcctcaaaattgtggtatcttttgaaatctgcagttgtatcttctgatataaagtatgtaggattagttaacttaccaagttaaccaatttataagtatagttaacttataagctgtcggtatatatacatacttatatataaaaatagttaacttggctgggtgtggtggctcacgcctgtaatcccagcactttgggaggccaaggcaggcagatcacgagggcaggaatttgagatcagcctggccaacatagtgaaaccccatctctactaaaaatacaaaaatgagccgggcatggtggcggcacctgtaatcccagctactcgggaggctgaggcaggagaatcgcttgaacttggaaggcagatgttgcagtgagccaagatcgcgccactgcactccagcctgggcaacaagagcaagactctgtcttggaaaaaaatagttaacttataattatttattttataagtataaaaggttagcagaagtatctatttctaaataaacttttagacttctggtcagtatggcagactgagataacatgggatgttcccttctcttgtttcaaatactttgaaatgctgggcacagtggctcatacctgtaatcccagcactttgggagactgaggcaggcggatcacttgaagccaggagttcgagacagaccagcctggtcaacatggtgaaacctcgtctttactaaaaatacaaaaattagccaggtgtggtggtgcccgcctgtagtcccagctacttgggaggctgaggcaggaaaatcacttgaacccaggaggcggaggttgcagtgagccgagatcgtgccactgcatgccagcctgggcaacagagtgagactccgttttaaaaaaaaaaaaaaaaattttgaaacgctggacaaatgtaaacctagagtttaggaagggagttcaagttgttatatttggaggttatcacatttttttattagtttgtgtttctgcacatatgtgttaaattttttactattttagtatctgcaccaagaaaagaaactgcttcatggagacataaagtcttcaaatgttgtaattaaaggcgattttgaaacaattaaaatctgtgatgtaggagtctctctaccactggatgaaaatatgactggtaagttgtactcttaagttttaaaattttgtttttaatacagtgtttacatttttaaatacgtaagtccacatggatcaaaaatcaaaaactatttttaaaaagtatatggtaaaaagtcccctttttttctctctctcccagtcagcctgcagtcttctcccttgccacatgtacagtataaattactgtattattattagtagtagtattagtatatattttaactggagttatctttgggaaatatttctaactggattgggatctttaagcagtaaagcatctgggaatagaaagtaaaatttagtaaggttgtgtaaagcggtttatttagcatgagtaaagtgacaagatttaggaaactggtagaagaaactggaatgaagcagaaaagaggggtgctaatgaaggctggtctttggctctttgccctttcttctctattgcatagcttctcagggaatttaagatatgttcttggtgagaaacaagagccagcctcaagagaaagcctctgcttgcaacatattatttagtaaataatacttaaatttgtctctttatatcaacagaagttaaacaaatggttaataaatgctgtttagaacatataaatgcctgaatttctagctgaagtaaaagtttacaagttgagttgaaggcaagagtcagaatgaatggacagactttataaataaatgatgtctgtaatcattaataaaaatagaactgttgtgaaaccttatgctaaataacttacaaaatgggaactttagaaagtaaaaggataaattgtcaaacataataaaaatgagggtttttaaagtatttttctcaatgcttaatagagcaaacagacaaatgtaaggatgttaaagatctgagtaaatagtaaggcaagtacctctgcaccataatatttattaaaattgaccatattcttagatcacacaaaaaaacttcgaattataaaaagtatgaatagtctaataggtgatattccttaacatcaatgctgtaaatctagaaatttgtaataaaataggaaacaaaaactccaaactttttaggaatttaaaacacttccgaataatttttggctaaaaagagaaatcaaattccatttataaaatatttagaaaatataagaatataacaagtcaaaccctatttgatatgttcaaaactactcaaaggaaacattttcattatttaacttttatgaagttaagttgaatattcaactgaaattgaaaaaaatgacgccctaagaacagaaagcagaaatgaatgaatttgatagcctataaattctacataatcttaatgtgatctattctagaacatgtcagaattaatctgaagttcctctttgaggatacatgttcaatcaaacatggctgggaaaactcgatgaaaggaggaggaatcttcctgagcagataaaaagttttataaagctacagtaattaaagcgatgatactcatgccaaaataggcagaaaaatagaacatgagagtcaggaaatagttcccaaatagaggaatttgttgtgtgataaaggtgacatttttgtattagtgagaaaagaggtagtttagtcagtaaatgatgttatctggacattttagaaaaaaacacagctgttttctatccttacacttgaatccccatatattgaagattgggggaaaaagtaacagtagaaaaaattgtagataaatagttctttaatgttggctgtggagaggactttaaagaagacaccaaagctagaaaccatcattaaaaagccatgggtacctccatttaaaaaaaaagaattctatatcacagtgggttggagaggggcagggagcttaagacattagaaactgagataaatgtataagatatttaatatttctaatgcattaagagttattagtaatcaatgagaaacagataaaagctctattatgaagagactgttgagaaatgaaaaaaatggcaattaggaaaatatatatgtaatgttcttactaatgttttaaaagctaaataacaatgagataatctgctatcaacactcatcacactgtgtaaattatctgttaaacgtttctccattcctccattaggcttgtaagctctaagaagggaaccttgtatatcttgtccactgaaatatcctcaactctagaatagtgcctgacttgtaaatatattattgaaggagtaacaagattgctagtaaataaaaagattgctagtatgagcaacaatgtaggttaacatgtcctctcatacactaagtagaacttgtaactgctgttttactgaggttagaataggttttgctgtggtaacacagacctcaaaaacttcagtgacttacaacaaccaaggcttattactcaagctgcatggccattagcaccttgttctgtgtcattctccctttaggacttatactgatggaacagccactatatggaacatggccaccattatggggagggtgaaaaagcattggagtggtactgtccaatacagtagttatgagctgcatgttgctatttacattaatattaaaacattgaaattattttctcagccaccctagccacaattcaagtgctcagaagctacatgtggttaatggttaccacattggacaatgcagatttaggagatttaatcatcatagaaagtttcattgaacaatactgctctagaaagtcttgcagtgatagttaaatgctcaagctcagaaatgacacaagtcatttcttgtggtagaacctttcaggtgacagtttggaaagctgtatttaaaataagaaaaacctttaaaaatgtttatgccctttgaccctatagtttcattcttaagaacacagtccaaagaagtaattgagtaattaggcagtacaggcattttttttataataacctgatatattatttcctgcaaaacttcattgcgcaaaagtttcaagatataactaggtttatagaaaaaaaaaacagggttaaaacctatgcaactttgaaaactaaagcagtaacaaaaacagttaataatcctaataaaagatactaacacattaaatctgcaagggcataaacattttaaaatatttttcttattttaaatgcagatttccaaactgtcgtctgaaaggttctaccagaagaaatgacttgtgtcatttctgagccggagcaagactttctagagcagtgctgttcagtgaaactttctatgatgataaaatgttcctttgtagccataaaccctgggtttatgctgaaggttacatatgagagtattttcaatagatacttttcatcaagatgaaaaatttgatctggctttctcactaaaaatatatatatatttttaagcgtgtgggaaatgtgttggcagctcctttacctggactcactcacagcttttgtagttagcaatagcaattcttaaagctactacaccaggcatatgctcagggaaggcatttctgtaggcaaaggctttctatttgtgagatttgcctctgatcacttcaaaaataacatttatgtactgggaaaaatatcaatctttttactgtttcaaaaatacacattgtagcagaacagactatgcaacaatgtgtgagaatgtccaccaataaggggtggtttaatttatactaccacacaatagaataccatatatccataaattatacgggtttatatttataggcataaatatatccagtgagataaacagagtataaaatagcacttatatgtatttacatatatgaagaaaagtttgaaaaaaaatacccaaatcttaaaattttttttaaacaggtaatatattaacatttcacaactaaaatatagtattctggctgggcgcagtggctgacacctgtaatcccagcactttgggaggccgaggcgggcaaatcatgaggtcaggagattgagaccatcctggctaacacagtgaaaccccgtctctactaaaaatacaaaaaattaaccaggcgtggtggcgggcagctgtagtcccagctactcaggaggctgaggcaggggaatggcgtgaacccaggaggcagagcttgcagtgagctgagatcaagccactgtactccagtctgggcgacagcgagattccatctcaaaaaaaaataaattaaaataaataaataaataaataaatatatatatatatagtattcgatgaaaagccaaaatcttaagtgtttatctcaagataaatttgcaaatattaatactatatacatgtcaggcaccatgaatatagagtacatgagacagacacagtcttaccctgttgcagctcctaatctaggatggaaagcagcttttgaatactaatgagacaagatgacagttatgatacaaggaattataaacacagcagtggcccttaacctagtctagatgttgaggaaggcctcgctaaatgatgtttaataagctgagaattgaaggataagtaggagctccagtttcatcatttttcagtttgggatagtaactaaagcatgtctgcttaaactctttgaatgtagtaaagggaaataaagtataaactgtttctgtatcaaccaaaagaaatgactgaaccattagtttatgatctcatcaaacttttgttgtcagaacaatccatcttcacagggagcaaacccaatcactaacataggtggcagggggcccaatccattatgtttaaatactatgttaaattcactatgtcacatgctattatgtttacagacttggagaactgtaaacatacatacaggaaatgcacttgtggttcgagtctcaaattggagccgttattttagacccagagttctagaaaactactttttagcctgatggatccttgtaggaatctgacctacttagaatgtatgtgtacacacacatatacgtgtatatactgaacggtgtaagtatccttccttattgccacagagtcactgcccatgtgggccatgtctataggcttttctcttgtcatgaattccatgaagtacctctaatatataaggtacagtataggggaaaacctttaaggagcttataatgtccatggctaccttctaaactgtaatgcccaaagcagaactaagtacaaaggctaccatagagacaccactcatctttccttcttgcctgctggtactgggtaccctcctagtctggtatttttgttctcacttaacagagcctgctcatttatcaggcatacctctcaaaatgttaacggaataaatgagtgcttgttaactggaatcttcaatttcctggcttatggattctcacttttccttcttttacccctcccttttgttctttaaatgttagtttcatcctcttttccttgtaaagttcttgagactctcagggcagaactttccttcagttctggagaaatttctttcagtaaacagccccactgtgtcttctttctattgtttcaaaatgaattatattgttttcactctaaccttatttgtgaggaaatgcagattatagtaatcaaatactgaaaattttcattttttagtataatacactctaacactgcctagtgaatattctgtctgtaagagtttgagtttatcctagttatagcagaagtaaaggtttgtatgacactatgggaggaatcatagagtatatttgttggccacaatggaattaagttagaaatcactaacaagatatctaaggaaaccccaagtatttggaaattcagtaacacaaatttaaataacctatgggtcaaataaaatgacaagggaaattggaaaatgttttgaataattaaggaaaatacagcatatcaaaatgtgcaagcaatagctaaagcagggctcagagggaaatctatagttgtaaattatattggaaaaaaggaaagttctaaatcaatgacctatgttcattgatttaatctagaaaaagaaaagcagagcaaatccaaaggaagggaataaagctatgagcagaaatcaatgaaataaaaaacaaatactataaaatattaacaaagccaaaagctggttatttgaaaagataatgaaatatataaagctttatctagactgatcaagaaaaaagagaacacaagtcaccaacaacaggaatgagaaaagggttattgtaaattctacacacatttaaagaataattaggctattataaacggctttatggcaatgaatttgacaacttagatgaaaaggacaatttctttgaaaaatacaatttaccaaaattaatataggaagaaaaggaaatccacatagccctatgtctactaagaaacattcccacaaagaaaactcaagacccagatgttttactgttgatttctaccaaatatccaaggaagaaatgatatggattttacacaaactttttcagaaaatagaggaataaggacctctgcccagtctgtttttgtggtcagcataactctaatatgaaaacctgacacattgtaggacatcctatcggtcctgatgtgattattatacactgcatgcctgcatcaaaatatcacattaacacataaacatgtacacctgctatgtacacagaaaaataaactgataagaaaaaaaaatcatagtccaatatccttcacaaacacaggtatcaaaatccttaacaaaatattagccaattcagtctaatactacatgagaacactacatcttgaccaactaggacttattccaggaaggaaaagttgtaacattcaagaatcaatgtcctcactatgctgtacgttaggtcaccagaacttactcatcctgcataatggaagcttcgtgccctttgttaatactgtacacttgagatttgctgagagtagatcttgagtattctcacacacacaaaaaaatggtaactatatgaggtgatagatatgttaattagcttgactgtggctatgaggtcagtgtttacatatatcaaacatcaagttgtataccttaaacatatataatttgttaattatacctcaaagcttgggggaggagtcaataaaattcaccatattaacaaaattgtttaagttctagggtacatgtgcacaatgtgcaggtttgttacataggtatacatgtgccatgttggtttgctgcacccattaactagtcatttacattaggtatttctcctaatgctatccctcccccctaccccatgacaggccccagggtgtgatgttccccaccctgtgtccaagtgttcttattgttcagttcccacctatgagtcaggacatgtggtgtttggttttctgtccttgtgatagtttgctgagaatgatggtttccagctgcatccatgtccctgcaaaggatatgaactcatccttttttatggctgcatagtattccatggtgtatatgtgccacattttcttaatccagtcattgacggacatttgggttggttccaagtctttgctattgtgaatagtgccacaataaacataaacgtgtacatgtgtctttatagtagcatgatttctaatcctttgggtgtatacccagtaatgggattgctgggtcaaatggtatttctagttctagatccttgagggattgccacactgtcttccacaatggttgaactagtttacagtcccaccaacagtgtaaaagcattcctatttctccacatcctctccagcatctgttgtttcctgactttttaatgattgccattctaactggcatgagatggtatctcattgtggttttgatttgcatttctttgatgaccagtgatgatgagcattttttcatgtctgttggctgcataaatgtcttcttttgagaagttgtctgttcatatcctttgcccactttttgatgtttttttttttttttttcttgtaaatttgtttgagttctttgtagattctggatattagccctttgtcagataggtcgattgcaaaaatgttctcccattctgtaggttgcctgttcactttgatggtactttcttttgctgtgcagaagctctttaattagatcccatttgtctgttttggcttttgctgccattgcttttggtgttttaatcatgaagtcgttgcccatgcctatgtcctgaatggtattgcctaggttttcttctagggtttttatggttttaggtccaacatttaagtctttaatcaaatttgaaaactacatatctcaatagataccgaaaaagtgtttgacaaaatccaacatccattcttgatttaaaagttagtttaaaatctagttaacctctcagctaactagaaatagaagggatcttagcttgaaaaaggctgtctacaagaaaaacctgcaggtatcatactgaagtagggaacaagaccaggatgcctgctcttgccagttttatttagcagtcctatagccctagccactaaaataaggcaagaaaatggagaaggcaaaattggaaaggagacgaaactgtccccgtttgcagttgatatgttgtttaggtagaaaatcccaaggaatctataaaacagctatagtgaagttagtgattacatttctgtgtattagcagtatataattgaaaatggaattgtttaaaatctatttacaagtaccaaaacccaaaatatttcggaataaataaccaaaaaagtctaaaacctctgtaatgaatactataaagcatcactgagaaaattcagtaagatataactaagtggagaaatatatgactgcggtttggaagactcaatactattaagatgttaatgcttactaaattgatccagagatttagtccaatcctaatgagaattttagctggctttttcattgaaattgacaagttgactcaagtttaaatggaaatgtgagtggacctatttctttcttgggctttaaaaaagagcctatgtgtgattggtccctttcccttttccttgacatagcaatcatggaagcatagaaatggtacttctctcagcctaatattgttcacaaaatgaagaaattcaggtctagaagtgatctgctcaaggtcacgcagcttgcacacacatgtctttgaaccaacccaagcaaggcagtctggctccagagtctgtaatctcaacatccacattctatattcctactaatttgtaagagaattgctgtttctctacatacctgccaactgaccagcttcttgaatatttaccaacctgaaaggtagaaagtaatccttattgaggttgagtgtatttttacattttctggctacactgattaacctgtgaactacttgttcaaatcgttcgcctgtttccctttgggttgcttgccttttcgtgatttgtagctcctgccttcataaccatcttgcttgtttcagtgactgaccctgaggcttgttacattggcacagagccatggaaacccaaagaagctgtggaggagaatggtgttattactgacaaggcagacatatttgcctttggccttactttgtgggaaatgatgactttatcgattccacacattaatctttcaaatgatgatgatgatgaaggtatgaatacaatttctaacataaatcccaatctcttcatttcacactaaagattatataattttatctttctaagatatgtattagtactgatgactgatttggtaccaccaaggtttaatctcacacaaatgagacatagattgagaatagggagaaaaattgaggctatccagagaagcaaaacattatcttaaaaactcccctttcctgagaaaatgattgattggaaaactatcacaggaagggtaaaagtaggggtcgataacctataaatccaagactaaagcaaatctacttgatggcaggacaattgaagacatttccattctgtctgtggcagaatggaaagcatactggaccataaattcttgtttcaggagaagggtgagctattaaacttttccatgacataaagtgattttgtttattgtttcaatctctaactccttcaagataaaacttttgatgaaagtgattttgatgatgaagcatactatgcagcgttgggaactaggccacctattaatatggaagaactggatgaatcataccagaaagtaattgaactcttctctgtatgcactaatgaagaccctaaagatcgtccttctgctgcacacattgttgaagctctggaaacagatgtctagtgatcatctcagctgaagtgtggcttgcgtaaataactgtttattccaaaatatttacatagttactatcagtagttattagactctaaaattggcatatttgaggaccatagtttcttgttaacatatggataactatttctaatatgaaatatgcttatattggctataagcacttggaattgtactgggttttctgtaaagttttagaaactagctacataagtactttgatactgctcatgctgacttaaaacactagcagtaaaacgctgtaaactgtaacattaaattgaatgaccattacttttattaatgatctttcttaaatattctatattttaatggatctactgacattagcactttgtacagtacaaaataaagtctacatttgtttaaaacactgaaccttttgctgatgtgtttatcaaatgataactggaagctgaggagaatatgcctcaaaaagagtagctccttggatacttcagactctggttacagattgtcttgatctcttggatctcctcagatctttggtttttgctttaatttattaaatgtattttccatactgagtttaaaatttattaatttgtaccttaagcatttcccagctgtgtaaaaacaataaaactcaaataggatgataaagaataaaggacactttgggtaccagaag

SEQ ID NO: 741 - DNA, 136432 bp, Homo sapiens
ggcgggggcgaggcgggagtggcggtgccagcggagggcaccggcccggcgtggcagcggcggcggagcgcggccccgggcacaccatggccgagctgctgcggagcctgcaggattcccagctcgtcgcccgcttccagcgccgctgcgggctcttccccgctccggatgaaggcccccgggagaacggcgcggaccccacggagcgcgcggcgcgggtccccggggtcgagcatctccccgcagccaacggcaagggcggcgaggctccggccaacgggctgcgcagagccgcggcgccggaggtaaccatgggcaggtgttcgccgggtacggggagggggcggctgcggacgtgcgggtccctgcgactccgccacgcggggccggccgggccgagagggcgccgtccccggcagtgacccggctcccgccgctgcgagcggacggggaggcctggccttccagtaaccaggatgccaccctccaacgctgccaggggcaaccgggtctattgagatatccccagacgctttcaatgcagtccatttagagacttcccactttcaaaagtagttaaattcacgtagatgccagcaaatatgtaagagttacgtaatggaacggaggagcggggatgtccttggcacttccccggggagacgttcttagactcccccccacccccgtattcttgcatttccgcccatcccccttccctgatgcgcacaaatgcgggtgcagccgggctcagcgcgctcctcaccgcgctgcaccgccagctctgggcacagaacttggggctcacacagctcctagagagatttacaacctccctgcactacccccggcgatgatgtcttaacagcaactctcgcttgccctcccccagagtctgggggtccctcctgcctggtgggtcttttatggaccgacaccagtgacttctaacagatgcttctgggagggaagctcgctacgctcccgctaggtgttcaaagcgtggttatacaacccactgcggcttggggggaaccagcgtgcgtcgtcgtcgcagtgcacagggactttaggcagcagggaccagacgggctgcacttggcttctggggacgcatgtctaccgggagcactggcagcacctgccttttccctcggcaaagtcaaaagtgtggcgcaggagaacagaaataaacgtattaataattcgaattccttgtacacagccacattttgttcttcctagaaggttttggtgaaagaaaggtggcctttacttacgtgtaaatttctagatgtagtaactgaggaattacgaagaacctggcttctgtgtggaatggaatattataggcattggattacagaatttgtttgggagggtgagggtggttgtgtgttctactccagagaaatcctcctctgtattttttcctctttattgttccttctttatcccatgtgacattccggtaacctatagatgagtatgagaacccctcttttttctcttgccttgtcttaaaaacggggcagagtaggggggataagaaatcagctgggcgtggtggtgcggcctgtagttccagctactccggaggctaagacaggagaatagcttgaggcggaggttgcagtgagccaagatcacgccactgcactccagccagggcgactgagcgagactccgtctcaaaaaaaaaaaaaaaaaaaaaaaaagaccaaaacaaacaaacaaacaaacaaaaaacagtcccatggctgaaacgtgccgtgacatattcggtgcacacactgtttacacccacaggtagacacgtgagttgctttctgttgctctcttcacaagcttctaccctgtttctctaattcaggaagctgaaaaagagtgaattgttccaccagtgcttctcaaactgttttaaacatcacccctggtaacttaactttaaactccacagttggatcctcttgacctttaaaagcaagctaagcagatttcttacacagttttatcttcttactgcttgacaatcctggtgggtcttcagtgagtgaaattgtggcggtttccccacacccacccagccaacacaggacttctgcttacagatcatgtaaaagcaagaaagctgaatgcccaagataagaaatcattgtgttggtatataatgggggaaatcataaacttgagagtgcttgataaatgaaaggttaattaatgtttttacaggtgggttggtttcaaatgacttgggaagattaatcctttacatacacacattgattccccccctcaaaaattatctcttatctacactcaggcaatttacaggactttaagggggcagttgtgaaaagtgtgctgccctctctgcaggcctttgtacaggcgttggcctgcctgagctgcctgtcttttctctaaatatcctccccactcatccttctatttccaaaggtcagttcctccatgggtgacttctctgaccttccagcctagctccccctgctatagtttttctttgctttctgcatttcttcattacagcatttatcacgttgtttaaatgtgcctttgtgtggatatctgattattccccgcccctccagaggatgataaactctaagaatgcaggcaacttttctgttatggtccttatttttttctcatagcctggcacgtaggagggactagtgacttttgtgaatacatgcatgtagattgcaatataaaattatagttttaaactttttttttaagagacagggtcttgctgtgtcacccagggtggagtgcagtggcacaatcataagtcactgcatcttccacatcctggactcctgcagttctcctgcctcagcctcctgtgtagctaagactacggatgcatgccatcatctggtttgttgttgttgttgttgttgttattgttgttttttgtagagacagggtctcactatgttgccaagactagtcttaaactcttggcctcaagtgatccttctgcctcagccttgcaaagtgctgaaattatagacgtcagtcactgtgactggcgatgtttcgtttttctttaaaaaaaaatgagtgaatgttgaaaatcaagtgatttttccgcatagcctagaaggtagcaccaggacgttgatttaggacccttcaaacaatagagaagttttcttcttcatttgagtgactttagatcttaatgaatctgatttaccttctcacctttcacattgtctatatttgttttaattttgaaacaggacaagtgtttcctgttttcaagtgactaaaagtttcctctacaagttctcattacaccacacgctgctagcttaaagattaactgcatcttttacaaaccaggagtgggcttggcttgtacaagcctgtcattgaataaattggactgggccttagaaattgcccagtagtcatgaatttcacagaaagtctgagtcctgaagggttaagagatttattgaggacttccaggatatccacacagtcaggggaagtcagatcttttgactcccaagtctaaacttctttcctctgtgcagattccagggaaaattccagggcctcactgtatctgattcactgaggtgtgtcctgttggtactggctgggacagggtggagatcgtgtgaaaagaggtggtattgctttcagtttgcaagggtatctgacttgcaagagtaactgtaggaagccatttttggttattgctttgggaggcactgccctgagcagaaggcaggatcctaggactgggccaggaaggtaaaggtgtgatgagaatttcatttatttgtcctggggtaaagccagcctcgtatataatggtattttgatttctaacatttttgcttactcaatacagttgtatttagttagactctgcagtgccttcctcagcagtacattagactaaggatcatcttttctaatatccctgtgtccagtactttttgataactgctcagacatagttctcacattgacttagggagaggttcaaagataagttgtttctagaaatcttagactcctagtttccctcttgaaacatttgaggctctaaatctgttaatctacgaaaccttgatttcattggtgtgctaaagtacaaatactacatcctggaaaccaggagaccaggatctagttttaccttcatgtcattttggacttctctgaacctcggttgtcccatctgcagaatgagcagagtgggggaaaaaaaacatggttttcttttttttttttttttttttttttgagacagagtctcaccctgtcatccaggctggagtacagtggctccatctcagctcactgcaacctctgcctcctggattcaaacgattctcctgcctcagcctcccaagtagctgggattacaggcatgcaccaccatgtccagctaatttttgtatttttagtagagatcgggttttgccatgttggccaggctggtcatgaactcctgaccttaggtgatgtgcctgcctcagcctcccaaagtgctgggattacaggccacctcccaaagtgctgggattacaggctgggattaccgcacccggccaagaaccatggttttctaaccatggctgtacagtatagtcacttagagaagctttcaaaacaaaacaaacataaaccaatgtccaagatccaggttagaagaggggtccagagaagctgaccaacaaagttgggaagctctgagttctcttctcctgggacccaccacccttagtatattcagtaggagggtggtgatggctgcaggcagtggtcatggcagccgtgacattttggcttcaccataactaaactggccaacagatcagactgcaagtttttattatcctttattggatgcttacatctgaaatgacaaaatgagatagttcgaaagaatatatttgatctttttttctagttacagatatcatcattgttcacaggagaaaacttggaaacacacgaagagaaagttaaattcatgcccgttatatcaccgcccattgctaatcacttagtaaatgttcagcccaatttttaatggccgcatgttcctccacaggatggatatactgtaatttagtcagctaggtgctgtgcttttggtttgtttccagtttttgcattaaaaatgataacatctttgtacaagtatctctccacctgtctttgattatcttccaaataaaatgtccagacttgaaactgttgagtgaaaaaaatgcatatattattgctcttaatagctactaccgaattgccctacaggaagagtctgctagggcaaaccactacgagggcaggttttcccacacactcaccaatgttaggtgttaaacctctctttaatctttggagaaaataaaccactttggcttctatctcacctttgctttcttcatttccagtcaacatccattgatcactaccatgtttctgggacagtcctcagacttagagacataaagatcaatacaatttagtttcttctgtgtgaaagcccaaataaaaggatgcagtgcaaaaaataaaaaaaatactagaatagaacgatgaatacaaggacaggaagacaatagcaggagtaactcaccttcccaggggagcccatgaagtcttgagttggggcttaaagagtgggtaggaatcaaacaggcaaaaatgggagaagctctttctttacctggattctcatgtgctagaacataaagacacgtgtcatttttggtgaatgatgacaagttcagcttggatatcatcagagtgtcagcaggaaatagttggtctacttaaaaagggtgatcgaaaccttaaaaatagttaaaatggtacatgttatgtatattttaccttaattttcttaaagaacataggctctattccaccttttagggaaggaagcatagctctctatttcttttcttcttttttgaaaaaaatagagacagggtctcactatgttgtccaggctagtctcgaactcctgggctcaagcgatcctcctgccttggcctcccaaagtgctgggattgcaggcatcagccaccacagccagcctccctatttcttaaacatgggctgcacatagtgacttccttccaaaaagtgcgatatagaaagagaagggggaaaaaagtaattttacagtgtagaaacttgacagacactcccttggccagatgatcaaggtcaacatcaccagtggtaagtcatgttgacatcatgttctcttgatgcatattaaaattatgtattcttgttacatgttgagggtcattctgcaaaatatctgaccagtactcttcaaaactgtcaaggtcatcagaaacaaggaaattctgagaagctgtcacaactcaagaggagtctaaggaggcatgactaaatgttatgtagtatcctggatgaggtcatggaacagaaaaaaaaaattaggtaaaaaataaggaagcctgtgtaaagtatggacttcagttaataataatgtatcaatattgtaacaaatgtatcataccaacataagatgttaatcataggggtacctgcctacagagtataaggaaggctgggagtatatgggaattgtgtattatcttttcaatctttttataaatttcaaacttttcttaaaaaaaaaaaaagtctatttaggccaggcatggtggctctcttgaggtcaggagttgtaatcgcagcatttcgggaggccaaggaagtcggatcacttgaagtcaggcattcaagaccagcctagccaacatggtgaaaccctgtctctaccaaaaaatatgaaaattagccaggtgtggtggcacacgtctgatgtaccagctacttgggaagctgaggcatgagaattgcttgaacccgggagttagaggttgcagtgagccaagatcatgccactgcactccattctaggtgacagaggagaccttgccccccgccccccgctcgaagtctaaaaattttacaaggtgggggtaattgaaggactatttacaaagacgtgggcagggttggaagaaaaccaacatgggaggatgaagcatcttggagcaagcaacttcagcctaaaaaagcaagaacagggaatagggttcgggtaaccccagacccactgagagcttagatggcagagggaatcccctgaccagagctgaggcccttagcaaagaaaggcagccacagccaggcaggaagaggttgaggggtggggatcagatctcaagctcattctccatatgccttctttctcatatcctaccagtgcccccactttaaccaaatttagcccatagtcagggagcttgggagctggctgaagcagtccatcaaggtcagcctccctggagaaaggcagagagtggactggagaggagaaatggaacccacccagcgcaggttgcatgaagaaattggtgtgataatacagctgcagttttgggctgcagccagagttttaggctgaagccttaatgtggcttactgcagaatttggactttatcctatagacaagaagatagcagtcaatttcatcccgtgtgccaaatcggaattggcaactgagagcactgtgttaagaagggatctcaggctgtctctgtgcaggattgatggaggtgcttgtgtgagtatggagggagcccagtggtgaagccttttaagaaatagtgatgttagattcaagcagcaacaaatgtaggactcacatgaaatcaaaccttaatgtctgttttgggtcctttgtgatacttctattgtcactctcacccacagatgatttacgaggaaaaagcacaaatggtttcttaagacagaggttgccatgttttgaatcataggatcccatcattatgactacaagctgattgagccagggctcagccctggagtgaaaggcagccttctataggctggtcagcattttatgacatggcttggcatggggacgtcatccaattaagatcatgcatattgtgtagtgactaacagactcaatcgaattgctccctcagcaagtctgaatgcaagacccagacataaatgttagagttctgacaaacctcagagaaaagagggaggttgtaaagaaacagaagcctcaagacacaggaaacaataggaactcagaagccagaggtggaggggggaatgaaaagtctgtagaaaagataggccagatacggtggctcacgcctgtaatcccagcactttaggaggcaaaggcgggtggatcacctgaggtcaggagttcgaggccagactgaccaacatggagaaaccctgtctctactaaaaatacaaaattagcggggcatggtggcacatacctgtaatcccagctactcgggaggctgaggcaggagaatcgcttgaacccaggaagcagaggttgcggtaagccaaaatcatgcctttgcactccagcctgggcaataagagcgaaactctgaaaaagaaagaaagagagaaagaaagaaagaaagagagagaaagagaggagagaaggaggggagacgagaggagggaaggggaggggaggggaggggacaggcaaagccaaacaaagcagaaaaaaaatttctgaatggaaaaagaagctaagacttgagtatggcagattccactgagcatgagaagctagaggaactgttatgtttcaggatagaatggctcagagaggaccttaggaaagaagctggctgtgtggctgctgcagttttcttagttcttgaggaattatattataaacccctctcagtggagggagcctgtggggatctcgcagtgcaaccagaatgtgctgatccctactactttgaaggatttacacttaattgcaagtaggtcgttatttctctcactgtagttgcgaatggtggctggtgaggaagaacaatggggagaggaagttagatccctctgctcacctgtgtaccctcagggcctgacatgcctggagcaaccaggtacttaatcctacctggtgaatggaagcttgaaaggtgcgctaaactcgcctttgtctgacttggcagaaatttgatcacctgccctttcctgtcacaacagaggtaacttatccctggacacttggcctggctgtgtcttcttgtagcttgatgatttttttccccccatgttggctccttcctttttatccaggaaactgatagagggttttgattaatgaataactttttaattgctttgctttcttctgatggatgccatgaagggaggtattgctaaaaagttagttgatggtgaaacatctgacaagtttaaaaatgtatttcaattactatgttttaggaaggctgtggacagccggcctggtgtgattttaacttttttgacttctaattaagatgtcaagacatttgcatttttcaaaaagcactttcacttcctcttgttacagttttcgttaatgattaagtcctctgtggtcccgattagaattatatcctgaactaaggcattcttgcattttatccagcaggagattttcttgtgagaaaacactgtcacagtttccaggcaacgcatcaagagtgttcctgtctatattaggaatctatgaaaataccaaaatttggggcatctgcaggtctttattattcttcttgcctggtgagatacattccatatactgagaaagtgaaacattgaaaaatcaaggcgagactgtgacttgtattttttgattaattaatttttaattttataattgacacataataattgtatatgtttatggggcacagcgcaatatctcagcacgtaggtgtgtgactcatgttttttgtcccctcaatcttgcttcaagcacaacaaaaagtccctgaggcttgggccagagcggatgaaaagggaaggcaccaactacctaagatcttgaaggcaaggcttgggagtcttgggaaagggggcagtggtttccctcaaccattttaaatactattctctcctcccccaaatgctcattggcagtgctatacctctattgtttaatgagaaaacacctggttcattgttactttgtttatttggtaaatgccttcataagaaatgccctttctgtcatctcagggtatgttttgatttgtccaaatggcaaaaattttgtttccataaaattttatgaaaaactgcccatcaaagcaaagattcctgtgggtgtggtggtgaatgcacaggctgctggggtaatgtgtcggcagctaaaaaagaccaggccttaattggtagagaaagggcttaggtgaaagataattaaagggtggctgtgaaatagaacatcaagtattttgtttaaagcttgacaaatggaaggagcctctgttagaagttggtttgtatattagggttctctagagggacagacctaacagaatggagatatatacacacacacacacacacacacacacacacacacacatatgtgtatatgtgtgtatatatatgtgtatatatatacacacatatacacatatacatatatatatacacatatatatatatggagtttatttagtattaactcacacaatcacgaggtcccacaataggccttctgcaggctgaggaacaaggagagccagtctgagttccaaaactgaagaacttggagtctaatgtttgagagcaagaagcatctggcatgggagaagatgtaggctgggaagttaggccagtctctctttttacatttttctgcctgcttatattctagctgaggtggcagctgattagattgtgcccactcagattaagagtgagtctgcctttcccagcccactgactcaaatgttaatctcctttggcaacaccctcacagacacacccaggatcaatactttgtatccttcaatccaatcaagttgacactcagtattaaccatcacaagtccaccttttgtcaacttgaacccatgtacatctcctgagatcatatgtaatcttcatatacagataacaataaggttataattatgtctaacataatacaactatccttcatacaacaggaaattcaccacgccccaacgcaagtactattacataaagttaacaatacttaaatgctgatatgaagtcaataaatcttatgtcacatgataaaggagaaaggaaataaaatgaaggtattttcttagtacaagtgtatacgtgcacaaacatgttttaacaaaagaataaggaaatactcatgacaattacagtcctggtttctgtagctggtcatgtggtcgtagctggtattggtgactaccttctactgcccattccctttgccttcagcaagcacttcagcaggtcgtggtttttttcctcgtagagtgattcaaaccttcattcctgaagggtctgggtcatttgtagtcttgcctggactgggctgttgtactttcccattgaccttaatcacagggaatggtaatactaagagatgccctaatggatcttctgtattccatgcatcctcttccttaactctgttgtgaagtatcatcttgatagtctgggtcagtcaccccaggcaacactgtaactcctttcttagcctgttgacttcaaggtaggaggagcccaaagtgtccagatggcaatcttaacttccagtttaatggaatcatcgttgtgcctcctagtggcagcgttccccactctggaactaagacctctaggccagcagaacataatgtcacaggaacaggaagcaaaaattttgctagtgaatccctaggggtgatggtgagttgtgctacttctacttccaccccttgattcctggaaacatgaattttgactatgagagaaatagtaccatatattggacactgattcagagcatacaaggccttctggagaactttgccccagccctgtaaactattgtcacctagttggcattgtaattgtgacttcaaaaggccataccagcattctgtcaatccaggtgcttcaggatgatggggaacatggtacgaccaatgaattccatgagcatgagcccactgccatacttctttagccgtaaagtgaatgcgttggtcagaggcaatgctgtgtgggatactatgacggtagataaggcattccatgagtccacagatgatagtcttggcagaacattgcgtgcaggataggcaaactgatatccagagtaggtgtctattccagtgaggacaaacctctgccctttccatgatagaagaggtccaatataatcaacctgccaccaggtagccggctgatcacccaacggaatggtgccatatcgagggctcagtgttggtctctgctgctggcaaattgggcactcagcagtggccataggtcagccttggtgagtggaagtccgtgttcctgggcccatgcgtaacctccatcactgcctccatggccactttgttcatgggcccattgggtgaagacaggagtggctggggaaagaggctgagtggtgtccacaaaatgggtcatcctagccacttgattaataaaatcctcctctgctgaggccacccattggtgagcactcacatgggatacaaatgtcttcacaattttgggccactcagagagttccatccacatacctcttccccaaatgtctttgtcaccaattttccaatcctgcttcttccaagtccgtgaccatccagccaaaccattggctacagcccatgagtcagtatataattgcacatctggccacttcttccattcaaagtgcacaactggtgcacttcttgaagttctccccgctgggaagatttcccttcaccgctgtccttcagggatgtcctagaaaggggctgtagtgctgcagctgtccactttcgggtggtgcctgcctatcatgcagaaccatctgtgaaccaggccctagtcttctcttcctctgtcagctgatcatagggaactccccatgaggccatcggtgcaggctgggggagagaaggcaaggtggcaggagtggagaccatgggcatttgagccatttcctcatgtaacttacttgtgccttcaggacctgctctagcccaatcacatatataccacttccatttgatgatggaatgctgctgtgcacgacccactttatggctaggtgggtcagaaagcacccagttcatgacgggcagttcaggtctcatggtgacttgataacccatagtcaaatcttcagtttccaccaaagcctagtaacaggccaagagctgtctctcaaaaggagagtagttatctgcagaaaatggtagggccttgctccaaaatcctggagactcccactgtgagtcacctatggggtcctaccaaaggctccaaatagcatccctatctgccactgacacctcaagcaccattggatctgctgggtcatatggcccaagtggcagagcagcttgcacagcagcctggacctgttgcagagccttcttctgttctggaccccactcaaaactggcagctttttaggtcacttgataaatgggctggagtaacacacccaaatgagggatatgttgcctccaaaatccaaataggcccattaggcattgtgcctctttcttggttgtagaaggggccaaatgcagcaacttattcttcactttagaaggaacatcttgacaggccccacaccactggacccctagatattttactgaggtagaagctccctgagttttagtcgggcttatttcccatcctctggcacgcaaatgtctcaccaataagtccagtgtgtttgctagttcttgctcactggatccaatcagcataatgtcatccatgtaatggaccagtgtgatatcttgcgaaagtgaaaagcgatcaaggtctctccaaataagattatgacacaaagccggagagttgatatacccctgaggtaggacagtaaaggtatattgctggccttgccagctgaaggcaagttgcttctggtgggcctcatggacaggaatggagaaaaaggcagttgccaagtcagtggttgcataccaggtaccaggagatgtgttaatttgctcaagcaatgaaaccatgtctggtacagcaactgcaattgcagtcaccacttgattaatcttacagtaacccactgtcattctccaagatccatctgtcttctgcacaggccaaatgggaaagttgaatgggaatgtggtgggaatctccaacccggtgtctttcaagtccatgatggtggcactaatctccgcagttcctccagggatgcgatattggttttgatttactatttttctaagtagatgcagctctaatggcttccatttggcctttcccgccataatagccctcaccctaccagtcagggagccaatgggggggttctgccggctgctaagtatgtctgtgccaattatgctttctggcactggggaaataaacacaggatgagtacccacagtaagttggacctgagctaaaactctgttaattacctgacctccataagcccctactttaactggaggaccacagtgatgttttgggtcccctggaatcaacgtcagctcagagtcagtgtccactagtccctgaaatgtctgatcatttccctttccccagtgcacagttaccctggtgaaaggccagaggtctccttggggaaggatgggagaaagattcactgcataaattttcggtaatgtaatggggtccttcctcaaggggacctggcctccccttcattcaaggtgttctgggtctgtaaactggctcaagtctggaaattgattaagaggccgtgattttctactaaaaatacaaaaattagacaaatgtggcggcatgcacctgtaaccccagctacttgggaggctgagacacgagaatcacttgaacctgggaggcagaggttgcagtgagctgagatcacaccattgcactccagcctgggcaacagagcaaaactccatctccaaaaaaaaaggaaacaaccaaaacgttcctcaggagataaattgttaaatcaactgcaatacatcatgtcatagaatactactcagcagtaaaaaggaatgaacaattgatacacatgataacttggatgtatgtcacgggcaataacaagccaatttcaaaagatcaagttctgtagaattccatgtatataatgttcttgaaatggcaaaattataaaggtgataaacaaattagtagttgctaagggtaagaaaggaaggattgctataaaggggtagtctgagggagatctttgtggtgatggaatgttctgtcttgattgcacaagtctgcacttgtgataaaatggctctacacatgtgccaaggtcatattcctggtcttgctgttgggtataattatgtaagaaggaagtattggaaggaaatggtgaagggtatatgggacaactctctactacctttgcaactgcctgtgaatctataattatttcaaaataaagttaaaaaatcaatactgccttataaaaactggttctgccatttttctcgcaacttttactacaggcattatttgtactttctgcacaaggaaatgtagaatagcatttgggagaaggtggcttctgagcctgctgtgctgctgtttccagagcttcagggcttggctgtcaaccttctgctcactgactgctgctatgtgccaaggagagcacagagaagtgtttgagtgtcagaaaagcacatttgtccttaattttattttgacagacttgttttatagcctcatgttttgtgtgtttttgtttttgtttttgtttttttttgagacggaatctcattctgttgcccaggctggagtgcagggtgcaacctcagctcactacaacctctgcctccggggttcaagagattctcctgccttagcctcccgagtagctgggactccaggcgcccaccaccatgcccggctaatttttgtatttttagtagagatagggtttcaccatattggtcaggctggtctcaaactcctgaccttgtgatctgcccacctcagcctcccaaagtgctgggtttacaggcatgagccaccacgcctggctgttttttatgttttaaaatactgtttttttaacattttgttaagctactttaaactggtgttgcaagtagatcaaatttgcacattaggacaacttcagtctctcttccagttgtctttttttcctcctcagtctacaaacatacttcaagtcattaatccccgtcttcacccaccgcagaacatcagctttcagcctagcagcgctggaatctgacactctctgcttcctttaaccatggaacatcttaaaagagccatctgagatctacactcccttctactttttcacacatttcatgcctgctgcatgactctagctggtatagtgtgaactaaaagaaaataaaaccaggaaagtgtattcagcataagagatcatttttgagggttactttgtccatgtgtaatttcattgagagtagctgtctaattttaaatgaaaagttttaaaatagttaattctcttctgatgtacataaaaagtagattcctctgtatttaaactgtattctcaatggtgaggcccagggctttggcagggaggctgactcatggttcagtggcttctttccctggcctcaaggtcaacaatagccattcctcacgtggtagaaccattacatttgtttaatagatttatgttcttctcccacaagtagttttcatcatcagaaagtatttgtcaaatatccaattgtaaaagatttgttcaactgtgttctacaaagggaaaaatttaatcacaatatccaaaggatattataaaagtaattaaaattccatatacatctagacatggaaacacattcatgatctattgttcaaccagaaaaagcagattaaaaagtagagtttataatatgaagtttaaatgtacacattttaaaactgtaaagtatatatttgaatatattttttcaaaaggatctggagtgatgaaccaaatgtttccagggattgttcttgggcacagagggtttaaatgtcatttttattttcttacttgtaattttctgtatactctgcattgtttacaatacgaaggtaggaattttatgtttagaaaaaattaaattattttaattttataaaaagattctaaggacattttatacttttgaggaatattagttactaagattattaccattgatccacattagaaccttaaataaattatcattgacatcttttttaataaagtgccaaatatcaactgtattgattaggaaccttaccttgaagaaatatttattaaactatgtgaagtactccagtagctttcttaaacgaaacaaaatggtacccccatgtctctacatgaagatgccacatggaattacagtatatcttttcctgttctgtccaagcaaccacatgaaatgctaagaacttaaaatacataatgttcttttgcactaatgggaatttcttaatgcactgaaagatttcagccttaaaaatatccttccttgggcaaaaatatattcttaaagaactcaggaacatcttaagagatacagatgttgaatgttatatctcctcttccctctggtatatttttggcatgtatcttctgttgtttctttaaaagttgcttttgaatatctcttttaattgttgtatgtcattgttttagctatttactcacttgcaggcaacgtcttgggcatgctttttgttggatcttggtttctcttcatctggtgacagtggttgaagtaaaggaatttttaaagtaagattaaataacaatacttagtacttatagcagacataaaatattatctgacagactttttatactggtgtgttttaaaagtatctttttatcttctcccttttttgattttgttgggtgatgtttttcgtaagtacagaaaaacatcgaacaatttaattgtgtaattcatcttcatgtctgtgaatattagataccagtatcataaaatttgattaattatgcaaatatccttgaacatataaaatacctagtcccctaggtgattactaaatgagtttcttttggctaagaatctaaaatgctttttaagaaaccaaaatgtagtttctttttgcaatgtgtttctgtactagtatttgaactctgaagtatctaatggtttttgaatccactctaatataatggtgtaacattggaaagatctgtctcaggggacccttaaatttacccttcctcagagcagacagttttatagccctcaatattaagattcagaccgcaagctcagcaggagtcaatagatcagtcagagtggagcctcgctgaacaaacctgaaatcagaacgatcaaatattgaatcatgacattatagtaaggaatgcctccgaagtaattgtcacatttgcttgtagtgacctttataaaatacccacgcttgaaaatgacatttttaatgcttcctcctctaaaaaactgtgacaatcttaaaattggaaatgttaccagaatggccattgtctggtgaagtagaagtgctgcatcatggattgaaaccattctcggctttgccctatgaatcatatattttttttaatttcagctttattttactaattttttaaaatttaatttagattcattgagtacatattcagatttgttacatgggtgtattgcgtgatgctgaggtctgggtgtctaacgatcccatcgcccaaggtagtgaccatagtacctgatgagtcatttttcaacccttgtccctctccttccctccccgcttttgaaatccccagtgtctatcgttcccatccttgggtctgtttgtacccaatgtttagctcccacatataagtgagaacatgcagtatctgggtttctttagcttattttacttccaaagaaaaggatttatgaggggctaccgtagagaaaaggaataatgacaattttctttcctgttgctcttccctctgccatttcttctcgctggtattttctttgcaggtctgtgttgtgccaagagtagatattgtttgttttccacttgtttgttttttttaaccattggttttggtgctgttgacttaggttgtgtgctacagggatcttggctatagtgagcctttcagggcctcacatggcccctcacagaggtctgtgtgttccatgtctgtgctgtattttgcaggggaggcagtgtaataggctaagatggtgcttggcttcttacacatctaaaacatgtcatgtaacctctactgtaacctctaccaccttggtttccttatctgtgaaatggggagaaataatcacatatacctcctagagttctgagatgtaaataagatcatctgtggaagtgctgaacacatggtatttggtgtcaagtcagccttcaaaggttatttttactattgtctctaccatcccaccattaccaacactgctgttgctgctactactgctaatggcacttctattattttaatgtgacaaggtcttttccaagaagaaattcctctcttgttgtagagcatgggtgatgggagacaagggaccttgggaccatacagatggtgcagatctactttcttatgccacttcataagggtagactctagtttgagctaatcatgtgctttaaattgttgcattgcagcatagggaagcattcagccatattgttttccaggatttgcgtggtaggagtttggcagtccttccttctggtggtctgtggcacccaatcatttgccataaaagtgcttttccaggttctgcttcttttcatctacgcttactgagttgtggaaatttttagagagtttcttattctgaaataacactactaatattcagccagtgtctatcaagtggatacaatgtgccagactgtgaaccctctggggtggataagcctgctggtccctgctcttgaagagctctcagtgcattggtggagacaggtaaacaggtgagcaggacatatgcaggaaaaggacaaattctttttcaaagttcatctgaacaagatctctttttctcagagtccttgattccccataagaaaacaccaaaccaacaattttgagtgccgttgcctccaagacgcctgatagaaatgttaagaggatttgaaacttatcaaggatagaactaggtgcagcagaagatctcaggctttagaaaacaatacattgcagctttgggggaaaaaatctttggagttttttttattagagtatacgaagtatggattcatgcataagactaaaatattatgttaagagaattttaagataggaaaataaattgtgagcatgggtaataaaataaagcttttagcatgcaagcatccagactccaattagtccctgaccagaccccgacccaggagacagttaactgtccagggaccaggaagagaggatcctttagaggtccttgactctgagcaaagttatgagaataaggccacttctgtggagcccccatgggtaatgatcatcctgtgtaaggtgaagatagtaactaattgctgctgctgctggaacctggccttgctgaacttggtggacctccttgaacctcagagcagggggtcacaaaccaggacttgttggaccaaacattgaccactgacatgctttgttcacacatagctttactagtggagcctgtctaaactttctgccttctgttctttgagacaatggaagctgtagcagcactggcttgcattcctgcataaccataagaggttgctttccagttccagttgcttccttgcaccatagcagctccctcagtccccagggctccctcttgtcccacacctgcagttgctttgctgactcacaccagttgcttgacccacataggcatttcaattcatgactcctggcctagaaaattccagagagaaggagaatagccatggttcctgagggagaaggactgtgctacccttgggactaggatgaccccgtctaatgctccctgatgtagtgggcagtccccagaggagaggctcagaatcactttggaacgattagaccatacagagctgccgctctcgatgggaggatgtgtggaaaaggctgatgaccagcaattaggtgtgaagtctttttattctgtgcctgctctgtagaccccgaaggcttagatgtcctctcctctgaatcctcccaatgccaggcttagatggatctactacctgcctcatcatctgggtactatcccaggagcttcctgcttggcctaggctgaagagaaaggctacagtgggctttgcagaatgtaaagggttcagattgtcagaagagttggagagaacattccagaagggcggaactacagagcaaagaactagaagtgggattaaatgtgccatgtggaaggaacatttggggactgaaaagagcagaggaacgagtagaaataaagtcatgggtctactcaatctgcccttgaatgctaggtgaacactctgggggcttatacctagagaaaccagtcattgttaattttaaatcagggggtagcctgaagagtgttgatgatgagggagctgagtacggtataggtagaaataatgagagataagaggtggaggagtcattggaaggtggtgacttcagtcaccttggatttcttagatgctggtaatggcaggagagtggagagacagggatgagtcagagacatcaaacacaaaacaaacaacccaagaaaaccttttttcttattgcacaagcagtatgtttttaatgtaggaactataaatagtcaaaagttttaaatgaaacagtcgatccgagtacccagaaccctgagggttacttgttgttgctatccgggggaatagctttctagataatgttttctatgcatgggttatatccatctttaataaaagtatggttttccagcttaattttctaatgtataagtccatctttagctttgttccacatcaataaacattcatgtacaaaactttaatcactatttcattggctgttcattattcatcatgatttatctctgccagccaattaagatcctttccatttttggctaaacagtggaataaatatttaatgtggatatccttattgatttgattgagccattttgaacagattgacaggaatcaaagatggatgccttctttgtccgtcgtatccagtgataactcaacatttggagcctgaaggatttggggcatgatggaaatgttactgaaataaatgagaaaatatggaaaaaagaaggattgagttgtaaaggaagtccgtaaactcagtagtaaagaaatttttgctgctataggtgacagtagtccctgttaatagttgcttgaaatttttattcttttctcatagaacaagaggttagaggctggtgaatgctgacatttgttcagctgctccacaatatcatcagactcaagctgcctctttctttatgctcctccatgttttgcctgttggcttgttgcctcatatgctaagatagctgctgttgcttctgacatcagaaccatgttccagctaggaacaaggtggagtagtgatggctgcttgtatcctttttataaagaaaacaaaagcatatccagaagatcttgcctctgacccacccacctccctacttctcactgacaggactgagtgtcatggccacccctaattgcaaatgaggttgggaaagaaggaagttgaattgccagactgacttgcactattgcctgaggtttggcctgagtttgagttctgctaacaagccacaagaaagtgggtagtgtccggtaagcaattaacagtgtctgtgtgttatgctttgagaaattgagttcctgggcattcacgaggttttgttggggcagtaaagaacccctgatatctgggccgaggatccataataaaagagaaaattagagtgattgttgcagaaccatagagggaacagaggttgactaatcagacacaagttaaataacagattgttccatttgaaggagaaaaccctatgagaagtgagaagaactatgctttactgcattttacatagatggtttcatttaattcatgtaattttcctcctgagaacctagtcattctacaaacatttattgaatgtttactatatgccagccactgagctaggcactgggaatacagtggtgagtaaaacaggcaaagcctcttcaatgctgagctcacgggttagtgaaggaggtaaaaaaaaaataaccagaggggcacataacaaataatgtcaggtagaaataagcacagcaagaaaactcatagctaaacaaggggatagagagagcaagagaggtgtatctccaacaccacgaagcaatttctcttgtcaccattttattgccaaggatgctgaggcaggccagctagaatcccaagtgaccaggtagtattcggcagaaccttgcttatgatctaggttggactccgaagcacatgcttgggaatacgtcatgcagctgggaattggggaaacatttagtgtctgcatctaagtggagagctggagtctctcatgggactcggtgagaagaattcaagctctgtaccataaagctctttggagttttatctttgctctacatcaggaacactcaatgcatgatttttaccatgacttcttggtctctgctggccaagtgtggttgttcaaacaaaaggactgtaccccaccatgccatgagccatgtgggacataccagcacctgctttgtgtgcaagctggagggatggttgaaaagagcacaggctctggagtccaactgattgggtttgcacacttactctcccacttgttggtgcataaacatgggcaagttagcctctatgggactgagtttacccacctgcagagtttctactgtgttgtagtggagaacatgtgagataagacagataatgggagcacaggaaatgcttaataagcgctgtgttgtttttgttggtagcatttagaaactctgcattattttttgttatgctcacattgcagagctagcctcagaaagacatgcttttccatgcagaagtctcaaattcacaagtttataaattgtgaacagcctggtgacatgataaggcactgtgttcccctgatggcatatttctgaagcacagcatgctcaaaattttatcttcccgtgttacatgcttttgcagacagcacaatatggaaccagtcaggctcctaattatgacagcagtccagagccagaatccagtcatccagttgacaaaggacttggtacagagaacagtgaccagctgttccccatctccagtgagcagcgagtaagaggaaatgggtttaagctgcatgaaggatttgggttatttatggtggaatttcctgaccgtgaaggttgctcaacattaggactggattacagagagagggtgtagaatttccgtctgtggagattccgaaaacatgttcttgtttgcgagatgactacagatgctgccttcccactgtgcgttctgtcttgtctctctccctttctacccatctggtcgttgaaaccaaatgaaccttctctaagacattgagggtggggctgctatttggagaagggaaaagagctcacagttaactggtcagaacatcatccactttttgacattttgattgcaggctttggcattttgggtgaggacacacaaacacaaattcatttagttaacctaggactgaaaagcccacctgggccaggtgaaaaacaaaaatggtcaggtttacaactttgaagaacttggagaacacgtgccccatcctaaggatgcagcctttactcaggtcagccaatttttttttttttttttgagacggagtctcgctctgtcacccaggctggagtgcagtggtgcgatctcaactcactgcaacctctgcctcccaagttcaagtgattctcctgcctcagcctcccaagtagctgggactataggcacctgccaccacgccctgctaattttttgtatttctagtagagatggggtttcaccatgttagccaattcttatcacaaggactgtgggaatgcacactgctgccaagctgattttcaagagcagtatgaaatctggggagttttaaaattctggcaactaattttctaaaagccagttatgtgtgtaccaaggggaatgtagatctgtgggtcataattccatgtgcagggtgcttgtttgtgacttctgatctgtgaggtcaccttggtccattggccctgctagcaagtatgggaatgagcatctctccaagttcagacacgggtttgaggtggcagaatttgtcttttaaaatggaaaacctctatatttatatttatgagctgaaccataagaaattgacatttttgtgtatcaacaataatcaaatattgtcaatttcatgtgcttcaatctaaaaggaatcatccacttaagagaaactagaatatgaaatatagactgtgttctgtcctgcagcatcaaacatttctgcctcctctgagacgaagaaagcactcactaactgttccagcaccccacgttatttactagcagaccatgcctggcagatggaggtgacatcagccattgcctgagtaacatccatcttctcatttgcaccaagcagcttaaagagtctgcccttcctgggactaatggctttaatattaacattgttgaagctccttttagcagcagcatagccatttgtggaaattttccaaataatcatctttctcttcttttatctttccttccatcaattagttataggctatcattttctacagatatttttagtttctatggatatcattgcagaaatcaactggacatagctgaggatgaaacaattgttaccctcaggtaggtggacagactccacctccaaaagcagtaagatgggtttcatccaggatccgcaacttcagtgattcaggtgtgaatcgaattgcttactgatggtgcattctgttaaacaaaaacgtgcattgagagagacacagctggcagacgacctaatgggaacctggaggggaggttctacctcggatgccacatcttccctcccactcccagaccaaatcctggggtttgaaaagggggttggtaccaaacctttgccatgtttgagagaaagacaggaagagagcctcacttttctcactggctttcccatgcatcctagaactcgaactctgatgaaagcatttctttagttccaagagctctctggatgaatagggtaatgggtttctttttattttctgcatcttttttttaactatttaatgtttacttcatattgatttataaacaacaacctctttgtgaatttccttcataatatagaaaatgtattttgaccaaatgtataatgcatttttattgtcttaattaactggaattccaacattcccttcccccatttctttgcttttaatgaaaagtagcaaatgaataaaaaccatacaaaaagagaaaaaaaaaaaaaaaactgcaatcagagatttaaccaaacaaaactccccactaaaaccaaactttccagaaacaattttcaaagttcctatgaaatcaatcatctggagggatattttaaagggaaaaaagtgctctgtaaaatgattagcttagtttcttcatgtgacctaaaaaagggcaggtggatgtaatcaacttctcaccccattgatggcgaatactttgaaagtcatattaatcatttagaaagtatgtgaccacacatgagacactccagttgcctctttgtctggtctcataagtgtgtacagaattattttgatgtgcccaaggcacctaaaccctacacgctctgtgtggctgactgagaaactgcagagcagatgtctgaagggctgatgtgctgagccctgggctgtgtcgtgaggcacagccatctccagctagccttgcttttatctgccacttgctagactttcccactgaccacaggctccccgcagctttgtgcctcggtttatagattgatggcaatgcaaggggactaaaagtaaaggaagataaatatcaaactcttaatcaaaggaaggaagagaagggaaaagatctataaattcaaaaatattttttcatgtttgctgagcatggtagcagagatacatggaaactcatggcctagcagttgtttaatgctgatgggtggagtaatcatcattattattatcaacaagaacttttatttactcagcactttctgtatgtcaggcactgtctaaatgcttctcatgcatcgatgcatttaattttcacagctctgtaaagtaagtacagttgactcttgagcaacatggatttgaactgtttgggatcactaataatagattttctttttttttcacatcaatttgtacttttatttcttattcttgaggttagattctaaaccctaaagatatccaaactgtattagatctacttatctatagccagagacagcttctatcatgttgtccttagcagccaaggttattaaaatgtcttttctccaggaagatccaataggaaaaaagaaagaaacctctctgattaggcttcaaccataccccaccctccatcatattgactggataggcataatggaaaccagaacatgtggtttccaaaaaagaaaaatcctatgagggaggggaggaggggagaggaaggattcagccagtgcccagagtcaaattgagtaatatcaatttcactctccttcacagatcttcaagttgtatgttcatggagtagtttaggaataaatccatggtttgtggagtactaaaatacctagttgtctgctttattacgttatggctttccccagcagtttccaaggcaaactggcaggagaatttggctggaactacatgcaggactgtagagattcctctccacagttatagaagggactgttccaggcctgattgttccagaactgggtgcaccaggtctgagtgttccaggagtagttgctccaggactggatgttcaggctgtggttgctgcagcttgaattgctccaggtctggttgctccacattggaaggtttccagtcgtgttcaccaggcattcctggtggtaagaagagtagaggctggggtaggtaggtgctgaggcctgagtcacaccattgctattctgcggccagttgtttttctgccacctcttagatttcattctctggttctggaaccaggtcttcacctgtttgtagctaaggttcaggatattggaaagttcttgcatctgttgaaggctgaggtatttctgtctctgaaatctatcattgagtacacacagctgggtggaagagaacacagttctggtcttctgtttcttgactgggaccttgtcttccttcttttgtggcgctattctctgcagcagtgggttgtttgcctttgggactggtaggagaatcaggactatcctcagatccatggaggaaggaagaggagagacagtcgcagtgtgaggcatctcagcaggagacatttgcaaggatggatagtttcttcaggcccacaaatgacaggcataggtgaagattctttacaatcagatgctttgaagccaggcaggtttggggacaagctggattcacactcatgttattactggggaagagaagtaaaaaatttaagagctggactggaaaaaaggctaaggcagcgttaagacttttctggaagatcttagagaaatatgacctccagaagtgaaagtatcaagaagttgggatgaagtgagccacctccacaacaacaggaggcaaccagctcagcccagcaaaatgtcaatgacagattttcttccacctctgccacccctaagacagcaaaaccaacccctccttttcctccttctcctcagcctactcaacatgaagacaaggaaaaaaaaaatgtgatgatctactttcacttaatcaatattaaatatattttccttatgatttgcttaataacattttcttttctctagattactttattataagaatacagtatataatgcatagaacatataaaatatatgttgattgactgtttatgttataagtaaggcttccagttaacagtaggctattagtagtcaagcttttagggaaccaaatgttatatgcaaatttttgactgcacaggggtcagcacccctaacccgtgcattgttcaagggtcaactgtattttatgttatatagttgaggaaacggaggcacagtgagattaactcacttgtccagggccacacagctagtgaatagtaaagcaaggattgaaacccaagtttttaacaatagtactgacctgcctcttttgataagcgtgctagagaacatttggtttatttccaaaagtgtagatgcattttgtaatcttttacttttgttaacaattaccatttaattttcctctctagcaaggaggtccttttgaatccttcaaaaatttaagcatttttacttcatgattttttttgccaatacaaacagaaaattttctctctaacctgcaagcatctgaagataaagagaggagagcctgctggtgtttatctttctcaaaaagataacgggaaatatgactcaggtggctcttgagagatgctgttcccattgctgatgttcagtgttttatatctgctgtctggatttgacttggagaaaagcatgcaaggtgaaatgtgcttacaactctctgccaaggtgaaaacctcaatactataataggagagcttggatgaggaaggagtgagttcagagataaataacttgactctatcttgtgataaattctgaagtggtctgttatgaaagtccctttcagacctatgggtcaaagtagattttctttaatgtgaaccacagtgatttcacaggtacagtgtaatggaggaccagaaacacacatagacttgttcctggatagctgagcttcttagacttgacaagcaggcttctgcttgattagctgaaaactcaggcaagtgtgagcctcattcccttctgtgaaaatgaggcaattggaccaaacagtggagctgttaaaaaaaaaaaaaaaaacaggccaatttgaacctcactccagatctagtaaatcaggctcctggagtagagtccaggtatgtgtatttttcaaagctccttgggtgtcattaagaacccgtagatggctactttctaaccagaatgtgtgctaatggcatgctccacttttatttctctgtctcttcagacaacaagcatttgttgaatgcttactgcgtggtgggcagaacaacagccattgtgttgatgccaggaattctgcaggaacaaggtgcccagcgtccttgccttcaaggagcttgaagtctagtttagatgaaaaaaactaacaggtacaagagtaagagaattaggctggtcatggtggcatacatctgtaatcccagctacttgggaggccaaggcgggaggattgcttgaccccaagagttcaagaccagcctggacaacatagtgagaccccccaccactccaatctctttaaaaaaaaaaaaagtttaagagaatttcagatgggctacaagctatgaagaagatagaacagggttatgatgtggagccagggaggtgagggcttgagaaggcatctctgaacggagatgtgtaggggagatggaatctcagagatgcgaaggagccaaccaggaggagagtgtgcttaggacaaagctcaggaggctggaatgtgcaagacatgctcgagtaagaggcagtaagcaacggccagagtggctggaacataaaaaaggagaggcagggaggtaggagagaggagcagaggtcagatctcagtccttgaccatggctgtgctttgggactttattctgagtgtgattgggagccattggaggatggagattgttttcagaaatgaattgattcttgattttcatttgaataagaccatttgggctgctctgtacaatacctgacaaggtggttataaaattattacttgatatttgactaattaggctttattttcttaacttgggatataactcacatacaatgaagtttactcttctaaaatgtaaaactcggctaggtgcagtggttcatgcctgtaatcccaatgctttgggagcccaggagtttgatgcttcagtgagctatgattgaaccactgtgctccagcctgggcaacagagtgagaccctgtttctacaaaagtttttaaaaattaaaaaatattccccgggtgtggtgacatgtgtctatagtcgcagcaacttgggaggctaaggtgggaggattgcttgagcccaggagtttgaggctatggtgagctatgactgtgccactacactccagtctgggcaatagagcaagaccctgtctctaaaataaataaataaatgtacaactcagaggtttttagtatattcacaaagctgtgcaaccatcactattatctgcttttagaatttaagaataaattgctttaatttgcaaaaaatgtgatggtataggaaatcatagtactgatcctggagtaaataaaagaaaacttggctgggatgatggagaaaacactcagactctcccattccacacatctaatgtaaattttgtgtgatgatggacatgttctgtattgcaccgtccatattgggagccactagcctcacgtggctgttgagcacttgaaatgcaactggtactattgggaactggatcttttattttgttaaatttaaatagccacatatggataccatattgaacagcacagctctatggcagcttacaaattcatagtcttatctgagatcattttccccgtctctcctacctccccggtgtctaaaatgattgaaatgttgaagcatatttattgtatttatacctaatcctcagtacaaagaaaaagctggagagttcccacaaggaatctagatgacaagaggcataaaggatggatgacagattctaagcatcttctggggtagaataggatctgagtgggagttaacctggttgtcaacacatgggtgacatctgtatgctcatggaaggcaaaggcaagtgatgacctcagccccagcttcacaactcacagcgaataaaaataattcccaaagcagaatattttaagagggcaataaagtaaggttatctctcctgctccacttgtgggttgcatgtgacaatagtaacaaaatcaccctttctaggattatgtccctgaactatttaagaagcttcaaagcgccatgaaagactctaaactctcatggttaaactcattaagccctaccctccccaagttccatttaagctgtttctattatttaaaaagaaaaaagaaaaaaaaatcttcagagccttgcatttttgtctagaggatttgcttttccatccttcataagtagaaaagtagcccaggaggagccttaagctttattaatattataaaatattcagtggtttttttaattgttcatttcctgttttttttttaactaccatgttttgcaaatatgaggcatacatgaaggtaaacaagtttaagatgtttcttgtcttaaaacttcctgtattattttggagccagaataaattcttgatatttattatgtacgatgttatgaaaagatgagatgacctttaatgtgtaaggcctatgcattaatatttgcctataaaatatggcatgttccatagaagaccagaaatactctcttattacctgacagatgtagaaggaaaaaagcaatcaggcgacctctaaaattgcgagcttttaaggtaaacacaaatgtagactgagattccataggtcaatatatttaaacattatttgttaaactaagaaaccattaaatataatgttttggcctcttatcttcacatctgtgtcttcatgtgacctggaaagttgggttcaaatttagaattctcggcctagagatttacactaaaaagtaggaaagtaagggaggcagcctgtctactgtctaggactacagaagggctctgtctgggtctatgttcccgcatgaacagccatcctcaaccaggcctccagtctagggtagtgcatgtctgtgctgtcctccaccccagggagggtagacctggggcagagacctgtgcaggcctgggatgcaggctcaggcatttgggtaggaaatgctgggattgccaatgaatgatctagagaattgagcatcttctctcgcttcatagggaaggacatggctggagcagggtcagagcagggggcctaaatcagaaagtccaggatacgaaccccagttacctggttctaggagccgatgaccattaagtgtctctttgtgttttttgttttgtttttgtttttgtttgtgatggggtcttgctgtgtgactcagcccgaagtgcagtggagagatcatggctcactacggcctcaacctcccacttaagtgatcctcccacctcagcctcccaattagctggaactacaggcaagtgccaccatgcctagctatttttttttttttaattttttgtagagatggagagtcactgcgttggccaggctggtctcaaacttcttggttcaagtgatcctcctgccacatcctcccaaagtgttgggattacaggtgtgagccaccgtgcctggcccagtgcctctgttgaaagaaactctgctccttaacattcccgtgataacatttcaccaagccaggacagcagagcagttacttattagagggctaaaatgtcctatattgttttagagcaaaaataagttactgatatttattatgtatgaagttatgaaaagatgagatggcctttaatgcatccttaagatctggctctacaggtggtctcttttacagtcagaagttttcagtttgctatttccgaggcttccgagtgcttttaaattttttcaagctttattgaaatacagttcacatgccatgcaatttacctatgttgttcctagtatattctcaatttagtatattgtgaccatcaccacaatcaattttagaacattttcatcaccccaaaaagaaacccatgctcattagcaagcattcccgttttcctcacctcacccccagcccagcgcaagcactaattgactttgtctctctagtttgcctcttcctcactgagggctttcgtacttttaaagtggtttccctatacatgtgtacatattaagtaggcccagatagaatagcaaaatctcaatacatccagatattttgttttctcagtagatgtaggttagtgcttctcaaactttaatgggcaagagaatcactctggaacctggttaaaattcccactgattcagccagtcttgggtagggcctgaaattctgaatttctctcaaggagtgctgctgcttgtctaaaaaagacacacttttttttctttctttctttctttcttttttttttttttttttttttgagacagggtctcactatgactcctaggctggagtgcagtggcacgatcttggctcactgcagcctacgcatcccaggcttaagtgatcctcccaccccaacctcccaagtagctaagactacaggcacatgccaccacacctggctaatttttatattttttgtagggacaacagggttttaccattttggccaggctggtctcaaactcctgagctcaaatgatctgcctgcctcggcctcccaaagtgctgagattataggcatgagccaccacatctagcatggaagccacattttaaagaacaaggaaggacacaggatgctgaagtcattattttaaccaaagcagcctccatttcagacaatgaattggtttagtatggcagagtcccattatagcatagaaagcatgaggggagtggtgtgtatgcatgcatgtgtgtgtgcgtgcatgggtgtgtgtgtgtgtgtgtctcagagagattgagagagagagagacagagatgggcagtgggcagaggctcccggaacatgaacctctatctaccattctgaaatgagggctgtgaggactttgtacatttcttttctcctttctggccttcaactccatgctcttcctgattcaccatcctccttgtaaaactgagatactgcaggttgttcaactttggttcccttctttatcaagactgcaaaactatgttcctctgaccatcgctgatgcaccagggtcattggttctggtcacacagcactttctggaaactgcattcttgtgaaaagaaatgagaaccacatttcccacactttaatatttttgacaagctctgtttccttgggcataggaaccacagtccctgttttcagagcaggaatctgaagcgcgcggccctcggtgacggggctcagtcaaaacccagggcctccgggtttgctcggggtgggcattgcacagcctgtggcattcagttgccatccacagaagaaggactcactttctctgggttttatcacgttgtttttgttcctgtggtttcttgctaaataactgtatcatcagatcccacatggcagcgccaaggccaaacacagaaaccaatttttattcatcttccaggatggcccatgagactccctgagtacccagctgttatttcagatgtgaggtgggagcgcagggaggctccagtggggctgctgggctgtggatggcagaggctgggttgtgtataaaacccctgagaacacgacataagcggttgagcttcatggcaatatgtctgtgacttctccttaagatacatttgaatctgaaaaacaatgcaaaattacttagaaaagacaagaatgtgaatccactggtgaccgtttacagcagcacatctctgatcatggcacctcttggctccagcactttcaaaggctccctattacccaagttctaaacccagcctccttattacgacctccagggctctcctctctggctttggcctccacttctagctctgctgcctacgactccctttacaaatccctcacaccctggctgctctgtcgtggaccaggtactgtttcaggaacacggtgcctcacagcttccatgcctctcctcttgctgttcctttctgctggaatgtccctctttcccttctctgttaaaatctgagtcttccttccagggtgaattcctttcctctcccttcatgatgcctttttaaaaaatctctttaaattaattaagcaatgggatctcactctgttgcccaggctgaagtgcagtggcatgataatagctcactgcagccttgaacccccaggctcaaacactcctcctgccttccaaagtgctgggattataggcatgagccaccacattcggctgtttttcgaatctttttaccgtctttctctcctctgtgttctactccaactggactttcttttgacattgtcttgtgatttacattgttaatagaaatgcaaatacaatgaccatttattgaacacatgctgtgtgcctgatggggtagcatgtgatttacataagtgactccatttccccttccaaatgccttagtaaagaagctggtgttgtccccactgcaaggtgaagttataagttcagacttccccagagttacctagcatgtccggcattggtcccaaggctggtgatgacacccagagcctcttaggcagcagtccccagcctttttggcatcagagaccagtttcatggaagacgattttcccacggactgggcaggtggggggatggttttaggatgattcaagcacgttgcctttattgtgcactttatttctattattattacattgtaatatattaatataatgaaataattatacaactcaccataatgtagaatcagtgggagccctaagcttgttttcctgcaactagatggtcccatctaagggtgatgggagacagtgacagatcatcaggcattagattctcataagaagtgcacagcctagatccctcgcatgtgcagttcacaatagggtttgtgctcctatgagaatctaacggggccactgatctgacaggaggtggagcacaagtggtaatgttcactcaccctccactcatctcctgctggttcctaatggaaccagtccatggcccaggggttggggacctgctcttaggttctgttcatattcgtttatctcaaccacagctggctggagccaacaaaggaagtctccagcttgtgtacaaacccctgtgacttccaaagtatagagaacttggctttacctgtgtgaaatgggttaggggactgtccctctgcctcagcacagcgaccgtcatgagtcatgcctgtccccaggtcgttctttatttcttcagcagtgtatctctgagctgtggtccttgagaggccttaaagcgtatgcttgaagcttttgcaaaacatggcagagagatcttgggtcctcaggagaataacacaagcaaacatcgtaaggccaagaaactcaagcagatggtggcggggaacatggtcaacacatatgcttatttggtcaggttaaggaatgagcagggtagaaagaggtccatgggaatggggtctccatgcaccccagcagaagtgagtagggagctagaaacgctcttgggtgacaagactcatgttagagcaaaagtgagcagggagtaagcagggagttagaagacccttgggtgacaagactcatgctcacgtcaacactggtcatctggtgggcttgtttgctgtaggggtcagctgttggatctgctgtgagaatgggtggatgaggaagtgaaacgcagcaaaactggatctagacaggtaaaaagctaagctcagccaaaagaatggtctgaaataatatttagggacctagagaaatgctcacaatgtaataatgctttaaaatttaagattttcgatcttaatcgcaatcacaatttcgttaagatacatagcaccacctgcactcacgattatgcatagtaaagggaccacgaggaatgttccagaggattgtctgaggggtgggacaatggcagttttgattttatttttatatagttttggaacttccatgatgttctcaagtaaaatgtgttaatcagaaaaaaaattgataatcagataatcagaaaaacaaacaaacaaaaattctcagagcacaaagcaagcagggtcggaggaggtagtctgggtgggaaggaccattgttcccacccagcatggttttcttcttaatgttctttcatgtgtatgcacccaacttcaaagcttttcctgagtttatttttgtgacgaatggctttaaacttcctcagcgacagcctcccattggggaactacagtgtgaaaatgtgacggaaattgatggaacttctcaagaatttctgctctaggcaagactttaggaggagcgtggagacagcaagactcttttggcaaaatgtcctccctcttccattctgtccccacttagtctattccatccctgactgatcacggatatccactaccacatatccacagtcaccccagggactgggaaggatcaagaaaggaaaatccttcccaagcactgtctttaccatcttggattcctttagagctctgaaaagcaaagggctggattcaagaaatggggaagcggctgagcacagtagcctataatctcagcattttgggaggcaggaggattgcttgaggccaggagttcaagaacatagtaaggccctgtctctacaaaatataaaaaaaatagttgatcatggtgccacagaagggtctcttgagaattgagcccagtctggactacagagtgagaccctgtctctatttttaaaaaatgaaagaaatgggaggagtagcatgaagataccattttgcttcagcctccttctccacgtacacatgcacccactaacatgactgtcctgaaagaaaattccaagctaaaaattgtgtggccatttagcccaaataaagagggaagtgggaaagcccttgtataaaaccaccttgactttggtgacaaatttgtcagacttcagttttgtgtttgtatgatttacctatttgcttttaaaatcttggtacataaaagattatcacagaaaaaactttatttatgcctgaataattttcttacatttttggcagtgccttttaatgcttcagaaaatgttttttgaagggaggtagggatgggtgaggacatgctgccaggttagaagagactgaatcaaccctcccaagttctgaatcctgtacgtgtgttggggtgaggggaaatgcctggatgaaaacgagtaaactgaagtttataacactccttctcgaacatcatacagctcttccaagtatcatttcgataagttaatataaatgaatcagaaacatctgcctgccaaatccctccgcacatacaagggcttaataattaaatggaaaaatgttcggttcaatgtgtttcaggttttagcagatccaagatgttttgaaaaacagttaagttcttaagacattttgattatttaaagggcagctggctctcccacccactttaaaaatggcagtggttatttctgttctttgtatcgatgccaatgtctcttattgtctgtggaagaaattctctagcagaagttcacattcctggtctctgaaatgatgactgcaaatttctgtcctatccagataaaggcttgcttctaaccctctcactatcctatgcccagatttggttcctaagcaaatgctgtgtccttcaagtacagaggttttttgttctttgcttttttgagatagggtctcactctattgcccatgctggagtgcagtggcatgatcatggctcactggagcctctaccacccaggttcaaacaattctctcacctcaacctcccaaatagctgggaccacaggtgtgtgccaccatacctggctaatatttttaattttttgtagagacaggtctcactatgtttcccaggctcttctcagactcctggcctcaagcgatcctcctacctcagcctcccaaacagctgggattacaggtatgagctactgcacccagcccaagcacagggttttaagtgatgatgagacagtgttttttctagttacaagacccttttctagagtcaagaagagcattgttgccaccatgggtcactgtctcacaatttcaagaatttcttaatttgtagtcctggtccaccttgaggaaaaggaagaaaagatattagatgttcagaggatgagctgaaatatgacagattatcaagaggaaaacagttcaaattgtgtaaaagactacaactgaaattccactgtaaaatgaaagccacattgggctcagtcccctcaaccctccctcctatccttggacgcagcagagggatcccgacaaacgcccactaagcaggtgacagtgatgagtgtgcagttccctctcaagctgactccaataagttgtccttacattttattgactttcagtctcgccatcctgaaattttaatcacctgagcgctgcttagacattggctagatcacccaacttgtaattctatctggacttgaagatgaaagaagaagccctcgtgcatttttgttccttctgttttctccttcaagggacactgtcagtctttcttaggcttcctgagtaatcatcatttaattttctttataggttggaaagtcttgattctcttaaaaaaaaaaaagtgagtaattaaaagtgacgggccaggttagtaaatagatttgtgaattcaggacaccacaggtctccctcatggtagaaatgatgccatttcaccccagtggcttttcagttcagaactgggaattaatgatattttctcaccaagtttaagaaatcaaaaaacaaaagaattaaagcagggcttcatcccactgtttcagagccaaaatttgttctagtctcaccagagtaaatccagttgtgctcccatttaaaaccctcccatggctttctgctccttccagcctcagtctcaagtctgggcttggtttcacgtctgctcttgaggtcatctcctctctgtctctttcacacatatcccagcaggcagagctgcctcctgcttggggcctttcactaagtgttctctctctgacccgcagaccctcaaagaagcaacacctctccttatccagggctcagctcaaatggctcctctgtggcaagcatccccagacacacattgatcactttgtaacccatttcctgctttaatttcgtcatagcacttattgctaaatgaagtagtcttgctagctggctgtggtggctcatgcctgaaatcccagcaccttgggaggccaaaggaggaggattgcttgaagtcaggagttcaagaccagcctgaggaacatagtgagaccatatctctacttaaaaataatattttaaaaatagtcttgtttattgtcaaccttacatcactgaagcatacacagtaaatgaatgttctatgtagacatggcccctgtttggaaaaactttgctgttttcaacttttttttttttttttttttttttagacagagtctctctctgtcacccaggctggagtgcagtggcgcaatctcggctcactgtaacctccacctcctgggttcaagcgattctcttgcctcagcctcccaagtagctgggactacaagcgcatgccaccatgcctggctaattttttgtatttttagtggagatggggtttcaccatgttagccaggatggtctcgatctcctgacctcgtgatccgcccacctcggcctcccaaagtgctgggattacaggcgtgagccactgtgcccagccttaatttttattttcagaaaacataacgacagttgttccctgcaaaggcctgagaaacctgtttctaagccaggattctgacagtagtgcaaaagcccttcttagggaaacatggtttgggtttttttttggtattgtgatgctctgagaagttaggaaaggctttcaaacttcattactccttcttaactaatttcaaatttgtcattccagtatttatgtaaacctctcaaatcaaggcaagaagtgcagtagcatatttctttctgcatcatcagtcagtcatttgatcaggctgctgtctcagggaggcatgtcttacctgtgccttccctttggtactttctagggttgaggtgcttgtctgggctcagttcctgtgttgcaggatcctccatggtatctgttcactgttcccctctggtttgtcactggcattttaatctatcacctggatcacattacttactctcttaatgccagttgagataacctctaatactgaggattaaatctgagagccttacttttgtgttgaaagacccttcactggggtgttcttgatcctaaagctactcacagtgaggtccacgggccagcaacatggcaacgtcaacatcacctgcgctcctgagaagtctctcccctgccccaggtcaactacatcaaaatctgctcattaacaagatgcccaggtcattcggatgcatattacaattgagaagttctttctagaagcctcactgctaccacccccaccatcatcatcgtcatcaacagccatgtcctgttgagacatttctttgcctgctctgatctgagtaccctgcacacaccatcaacacgatcttgtttcatcctcccaaggtctctgtgtgctatgtactcttattattcccattagcaggtgaggaagctgaagctcaggagatcaagtcatttatgtgaaattatccgggtagggagcataggtagcttgagttcaatctgagacactttgcctctagcatccatttccctctcccctaggccttccttcttccctgctggccaggtcagctcactccatattcatttcatttgcttccttctagtcagtctgcaaaactccaaaagcaaagccactgtggagggaaggctgcttcttggcgtgttttgtaaaagagctttgaatcttaacattatcttaaaataagactgagttgtaccctgtgtagattttatctctctcagccccagagaacaagctctttctgctgtttccaattaaactggatggcttagagttgcagattaccatccccccgagatgtgaactcctggctctgttgaagtggtggagtatcttggacttgacctttggaagaaaatgtatatttaaagctctaatctgaaaaaaaaaaaaaaaaaaaaaaaaaaaaaaaaaaaaaacagaggaagtaatacaaccttgcaatgacattggtctacagtttatcaaattctttaaagacctcaaggtcagaatagctatagcctgtgtacttgagaccaaaagttaattacaggaagatgatatctggcgtctggaagaggttgaggtccatgattttcagattgattactgaactgctctgctctgagaggatgctccctctagagaaggactggggcgtggggcggttgtggcagggcggggagcggctggcctgggatagaggtttggtggaccctacttcattttcagccaattagtacagtactttcaatgagtactttcaatcttatatcattttatatagtaggccctagggtaacattttatttaatgagcctttccttccttgtaaaaaaaaaaaaaaattgtacattaaaaaacaactgagctaatccttctccatccattgcattctttgcagttgaggctgttgaggctcagaaaggcaaattgacttccccaaggtcacactttgttttgactgaaagctatttcttgtattcctcctttgaaagctcaaaagctgggctggccgccaagtctgctgggcattcgctcctctgctgtgtagatcagcccttattatgtccagtggcgctgacctgggtatatttcctttgcatttaggactcctttgtatgtgtttggaaagcaaagcgctgttcaggtgttcattggcagggtttagtcagtaagtcatacattctcaatgttctttttcttccaccatgcagtcaatctgcatgcctccccttcttccctggtttatttaaacattgaaggcagccttgcaaacaacacttaatactccaatatcagcaagatagagtagctcttctgcaaccacaaggttaaatggctgaaaaaatcccattttagggaaatgtgcatttaaagaacttacgacctgaaagggaatatggggttgggagcctgagataataaggagccctaggaaaaccttttttaaaaaaaactttcagaaaaataaactaataaataagagcctctcatgaggaatatcagtaacattttgcagctagtaataatgggtaataataatgtgggtaattttcattttatcatttcttgtttgtcagacacttcttcatttgctgtgtgacagatgagatgcatgctaagaaacattttatttcttttttttttgagacggagtctcgctctgtcacccaggctggagtgcagtggcgtgatctcggctcaccgcaacctccgcccctccaggtttaagcaattctctgcctcagcctccagagtagctgggattacagacatgtgccaccatgcccggctaatttgttgtatttttagtacagacagggtttcaccatcttggccaggctggtcttgaactcctgacctcgtgatctacctgcctcggactcccaaagtgctgggattacaggcatgagccatcgcgcctggctgaagcattttatttctaagagtggctctcctcaaagtctgccatcaaagcctaggccatcagctcttttgctggctagtcagaaatgtagaggtagaattctggaacttggtttcattggcctcagcttttgctcctctcttctctgccattctattttacctaccatttctaaccactatttcttccttttctaattgttcccagtaggaacaacacacacactggaactgaaattcctactatttccaaagatgtattgaagtcacacacactgagatttactacaaaggaaactcatccttcttctaaaaagacaaatatgtgttgttttatgttttagtgcagcattatttacaatagcaaagacttagaacaaacccaaatgcccatcaatgatagactggataaagaaaatgtgatacatatacaccatggaataccatgcagccataaaaaagaatgagttcatgtcctttgcagggacatggatgaagctggaagccatcattctcagcaaactaacacaggaacagaaaaccaaacaccacatgttctcactcataagtgggagttgaacaacgagaacacatggacacagggaggggaacatcacacaccggggcctgtcagcggggtggggggcaaggagagggagagtagcagggcaaatacctaatgcatgcggggcttaaaacctaaatgatgggttgataggtgcagcaaaccaccatggcacacgcatacctgtgtaacaaacctgcacgatctgcacatgtatctcagaatttaaagtgaaattaaaaaataaaataaaaaagacaagtacatgttgttttatttaggtacatctaagcccccaagaatttaaaggaaagtattggctctcaagcgatttaatcatgtatacagagaagttatctaagaaatccttggggtgtcatctatatatgctgatattttaaacttcacctttggttattctgttcctcagaagagttggagaatagttagcttttccctcaaaaaacaaattcctgagagattgtaataaagcctgtctaaagatattagttagtgatatgtagcactaaagcagtttgctatcacttttggtggtcttttcaattgtttactaggtctcaggtcggtctctagagtagggtaatgatggttgctgagtacttataatgtcatataacacttgggtatcatgaaatgatagcagcgaggcttttgttagagttcggcaaaatttatccttgtaaagcttcaaggctggaaagattaccaggtgtatctggtagctgatgggctaaaataacaaacctttatgtgaaaaggagctctttatagggtgtgcctcaaggtcaggcctattggattgtatatttgtaaacagaacctgccgagattagtccttacctcaggcagttcatgattccgctctagagagaggcatttgtcacttaacttgtctcggacccttgtccttgttttgcaaatgcaaccatggtatcttagcagagaggtgaaactctacacttccttatctaattcatttgtgcattattgtcattcctgtttaggatgaatgtattgccattctctttcaattgaattcacttggaagtaaagtttatccctggtgggagacccctttttagattacatgtacttacccctgaccagtaactgtctcccggtagtcctgtgcactgctcggcttgagactgaattcttatgcttatcatgactcctttggatgaatctagatccattcccagagaggagtgtcaactttccctcagggctatgttggggaggtagagctgctggaacaaaactgggaacctcttagtgaggtaaaagagaggaatgcatacttgatagccaatagtgtcaagtacagttatgttcttgcagtttccaaggtcatttttttttatttctgaagtataaaagtactctcagcctttttaaggccttaaatacaacaatgatcctttaaaaatttattcccccaaattgtgctcttcccccctctcccataagagttccttgaagcagacatcacacctggctcttccaagtatgcttagcacttagcacagaatgggcatcataggcacagaatgaatatttacaggataaatacataaacaaatgtaacttgttttctgaaatcccccgggattccagaacctcagactttgtgtagagcaaaacaaaacaaaaatccagatctctaagagtcttgagaaaaatctccctgtaacagtgttgtctctttttctctcctattttagtgttggcattttactttgattttatttttataaagtttacgactaccttaagtaggattaaaattatgctttttagtttcatgtaacagggtgaccatgttattgttttttaagttgttaagatcccataatataaaggtgtttaccatattttttactagattgctgattttctgttttaattccctaagtctttcttttctgcccactcccagggtaagtaggaagaaaaggatgataaaaaatgagaatgcattttaacaggtcttgtgtgtactttctgctaagcgtttctcacaccatcattgtgatgggttaacttcattagtcccatttaaaagatgaatttgtaaggttcggaggcaagtgatttttctaacatctttgtattagttatccattgctgctgtaacaaattaccacaaacttagtggcttaaaatgcaaatttgtaatctcccaatgggttcttcctgctgcacaaataaaaccaattcactgaggcaggttgtattgcagttgagaaagagtttaattaatgcagggcccactagccaagtggaagacgagagtttattactccaatcagcctctgagtgggggcaacaggaccagtggagtcatgagtcatgggtctaggtggagtcagttggtcaccagaatgcaaaagtctggaaaacatctcaaaagacaaatcttaggttctgcaatactgatgttatatgatgatgatgatgatacagatataggagcaattgaggaagtcacacgcctggtcagtaagtgaattgtagaaacgtaagctgggggacagtggctggttgtcctttatgcctacatcttagcagaattcaggcctctcccaaaattctaatcttgtggcctttcattagtcttacaaaggtggttttcatcccccaacagggagcagaccagttttagggagggactattaccatccttgcttcaaagttaaactaaactaaaggccaaggcaggcagattacctgaagtcaggagttggacataaacctggccaacttggcgaaaccccgtctctctaaaaacacaaaaataagccaggcatggtggtgcacttctgtagtctcagttacttgggaggctgaggcaggagaatcgcttgaacctgggaggcagaggttgcagtgagccaagatagtgccattgcactccagcctgggtgacagagcgagactcggtctcaaaaaaacaaacaaacaaaaaataaaaaataaacaaagttaaactaaactgaattcctcccatgggtagcctggcctacacccaggagtgagtgaatacagccagcctgtgaggctagaagcaagatagagtcagccaggctagacttcttctctttcataatctttgcaaaagcagtttcagatttattctcttataggtcagaagtccaaagtggatctgatttagccaaaatgaaggtgtcagctaggtggtatttcttctggaggctggagggaagaatctgactccttgctttcttccagctcctagaggctgctctccagattccttgactcggggccactctctccatcatcaaagccagcagcttagcatcttcaaatcgttctctgactctgaccattctgcctcctccttccatttctaaagaaaattcttgtgattaggttgagaccacccagaaaatccagaataatctccccatctcaagattattaatttgaggctgggaaggagaggggatgaagagaggttgtttaatgcatacaaatatacagttagaagaaataagttatagtgttggatagcacagtagggtgactacagttaagaatatgttattgtcaggccgggcacggtggctcacgcccgtaatcccagcactttgggaggccgaggtgggtggatcacctgaggttgggagtttgagacgagcctgaccaacatggagaaaccccatctctactaaaaatacaaaattagctgggtgtggtggtgcatgcctgtaatcccagctactcgggaggctgaggcaggagaatcacttgaacccaggaggcggaggttgtagtgagccaaaattgtgccattgcactccagcctgggcaacaagagcaaaactctgtctcaaaaaaaaaaaaagaatatcaaaatagctagaaaatgtctgaaatgttcccagcactaagaaatgataaatgtttgaggtgacagacatctgaagtaccctgactgatcattatgtgttatacatatgtataaaaatattacatgtgcctcataaatgtgtacaattattatgtatcaatacaaattttaaaatagaaagatcattaattgcatatttcaagtctcttttgccctgtaaggtaatatattcagttctaggatttaggacatagaaatctttgagggaagcattactctgcctattgcagagacccatataatgtcctaacagaattgactttctccaggtttctagctctctgcatatacaagaaaaaagtttttggctttttttgtgtgtgtcttctcctggtacttctgtcttggatattgcttatttaattttacaaaaaattcacagcctctgtgtttgtttgaataaattgaggttgaaaagtgttcagccacagcaatgataccttaataacataatgggagaggagacagcgtcttggcaattgagacctgtgagttttagacagagatgtttaaaacttgacatattgcatgaactcacagagtcttctaacttttgtcttttaggcttatgtacagaagtacgtcgtgaagaattatttctactattacctattccaattttcagctgctttgggccaagaagtgttctacatcacgtttcttccattcactcactggaatattgacccttatttatccagaagattgatcatcatatgggttgtaagtattattactactcattaactgatgctacttctaaaacaactacttcctttgatactcaagtactttgcaaatatgttctttctttttttttttttttttaccacttagagttgaatttgttgcctaatttcctttggaaaaattagaaagcaatagacacaacttgtgttccctgaacagtaagggaattgtagaaaggtaagctgggggacagtggctggttgtcctttaatgatgcctacatctttgcagaattcaggactctcccaaaattctaatcttgtggcctttcattagtcttacaaaggtggttttcatcccccaacagggagaggaccagttttagggagggacaattatcatccttgcttcaaagttaaactaaactaaaagccaaggtgggcggatcacctgaggtcaggtgcctcccaggttcaagcgattctcctgccccagcctcccaagtagctgggactacagatgtgcaccaccacacgcggttattttggtatttttagtagagatggggtttcaccatgttgaccaggcttatctcttactgctatgaacacaacttgttttatttgtaaaaaccaaatctgtgattttgtgtactttgagatatactttcccaagggtagatcaaagtaggagagggcataagtgatgaccagagaagaaaggaacctttctaaggacccatagagtggtatgaaatgcatcctcccaagaggcctattttagtaaaatttgatcagaacctaaaatcagaagctgttgagcaatacctccaagcagtattaagtgattatacacatgggagaggccaaaacacataaggcaaagcagcttccttgagagaacgtctagtgtagcaggagcagctgcaaatacacagaaaccatatgacaatcccaggtagacaggcagagcctttttctgctgtttcactggtaaccctggcatttaattttgttcagggccaaatgagttctgattttgtgtctcattgaaggagatggtagtcatttgcaaggcagcaaggcatactccagatatgtaggtttggtatcagagaggcctgagctcaagtacagtccaggccccatctgtgtgcccttgcgctgagccttaccttcctcatttgtaaaattgtgtgaataatgtgcctccccagaatcatcgtgggaatatctagagtgtgcacagagctctaggcctggcatgtggaggactctgcaggttgctatttgagcatgataacgcatagtgactggtgcatgaaggcgaaggagtcttgaagatcaaccaactctaaggtcaaaggttatttagctggtggagggaacttccagacaagactgttgccctgactcaagattctgcactagaaatagaggttcagaagcacttggttgggtataaaagagaagattttagcaagtgactttcctatggtgagcattatgttttctcatttgtagaacaagtagaatggacttgatcaggggtcataaattcgaatgttctcaggggcaggggacagaaataaagcagcaatgtcctgggccagggtgaggggtggcaagggcggggtatccacacaaattcttcaccaggtggtgacagagggactagggagcaactgcccctggctccacctgggacttcaaatccctgtctcccaatagccctcttttgaaatctagcttctgtctaaaagtataatctgagagtctgcaaaagcataggcatcttgcaaatcataaagagaacgttagtccagttgtccctccccgtttctgaggccacttctgtgtccacggagcaggcaggatgggggcaggagagagagaatgggagtggtccttctgttcttaacatctgaaaacccttggaaaacctatgggcttgagtttctttcctactgtcgtttattttctaagatgtgtgtgtgtgcgtgtgtaaggtataactgtatatatatgtatgtgtgtatataggtgtgtgtgtatatgtatgtatataggtgtgtatatatgcgtatgtgtgtatacaggtgtgtgtatatccgtgcgtgtatataggtgtgtgtatatgtgtatgtgtgtatataggtgtgtatatgtgtatatataggtgtgtgtatatatgtgtgtttattgtatgtatatagatgtgtatatatgtgtattggagtatataggtgtgtatgtatgtatgtatagtgtgtatatgtgtatatataggtgtgtgtatattttgtgtatttatgtgtgtatgtatataggtgtgtatatatgtgtatgtgtgtataggtgtgtatatatgtgtgtttatagatatgtatatatttgtgaatgtatgtatataggtgtgtatatatgtgtatgtgtgtgtatataggtgtgtatatatctgtgtgtgtgtataggtgtgtgtatatgtgtatgtgtgtatatatgtgtgtgcataggtgcatatatatgtttatgtatataggtgtgtatatacatgtatgtgagtatataggtgtatatgtatgtgtgtatgggtgtgtatatgtgtgtatataggtgtgagtatatatgtgtgtctatgtgtgtgtgtataggtgtgtatatatgtgtatgtgtgtatataggtgtgtatatatgtgtataggtgtgtatatatgtgtgtttataggtatgtatatatgtgtgaatgtatgtatataggtgtgtatatatgtgtatgcatgtgtgtatataggtgtgtatatatgtttatgtgtatatatatgtctgtgtatatatgtgtatttgtgtttataggtgtgtatatatgtgtgagtgtatgtatataggtgtgtgtatatatatgtgtgtgtgtgtgttctaaatcccaaaactttaataattgttgagtggggcagatgatgagaagtacattacacaggaatatcttataatgtgtttgatctgctcatggccaattatctcccccactgagggtggaaaactttccctgagagctgggaagacctctagactctatagaaggctgtggctaggggacactctcgttgccattattggtggttattttctgcttcggattcctcacttcaaagcgtcagagtgcttgtctgaggcaaaatgacaagcttttgtcatagagtgaggcaaataaaatctttgcccaagaaaggaagaaataacctctgaatctgcagtttgtcctgaggtttggccacctgttacttgactttttaaaatcggtgcatggcctggttcaccagtccccctgtgctgagagttctgtagttattctgtgtggtcattgtaaggaagtgtgagaagcgtaaggtaatgtgagaaggcagtgtgagaagcgtaaggtagtgtgtgcgttcctgccagtgcctggggagagagtggaggccattccaaggggcgagagggagagagggagagagggagggagggagggggagagggaggtgcgggtgtgcttgcgtgtgtttgtgcatcttcgtgtatgtgcatgcatttgtgtgtgtgtgtgtgtgtgtgtgtgtgtatacgtacgcgtgttgggattaggggtgctctctgatgggctacagagacaataatgagagatatttggtttgcctccagagttgaaggtggatgaaaggaagggcaagtcccggaggttggggcggatttgggagcctggggtggttaagggttaggttctggtacttgggccagccagggcaatcagcttcctgctgaggcagcctttcttcagaaaacgatatccctaaattagtggctgcttcttcaaaggggtagggattaagaaatgttaattacataagggacagagcttgaagtcttgtaactgaacatcttatctcgcccaaaactcactggaaggcaactttgttcaggactgccaaagcttggcacattttatattaatttgggaattgtcactggatgaagcccctatataggttttattgcttttaaaaatcttgtgttacattaagggtgactcacactgtctgaagtagcttagcagaatttatggttgttatcaagtgctctctcctcacaatcataattagtcctcacctgtattgtacatcttttgttgcttttataggcatctatgttcattatcttatttgagcttcataacaatgggcagtatcattttttagattggaatagtaatatttcaaatattgataagccataccctatattgagcatttagtatatatgccattcgctgtcagagtgctttacatattttacttcacttaatcctaccagcaatactgagaaatagttattaccagcccactttacagatcctgaaactgaaatgtagaaaggttaaataacttgcccaagatcacactggattaaatggcaaggtggatttgctcctgcgcccaggccttgtctaccaggggaagctgccgtggttgtttcttagaagaacgcagctaagtagcataaggagcacaatattttttaaagatgctaaaactggggcttcaagtattacaatgatttgcccaaagttttcttctattgaatatttgctttggtttgtgttccagctgtgctcttatggcatttattaaccctgtgctctgcttgactgtttcttatctacccttctttttttttttttttttttttgagacagagtatcgctctgtcacccaagctggagtgcagtggcgcgatctcggctcactgcaagccccacctcccgggatcacaccattctcctgcctcagcctcccaagtagctgggacaacaggcgcccacccccacgcccggctaattttttgtattttttagtagagacggagtttcactgtgttagccaggatggtctcgatctcctgacctcatgatccgcccacctcagcctcccaaagtgctgggattacaggcgtgagccaccgcgcccggcctcttatctacccttcttaacccatttatgcctagtgttccattattggaacgcgaagcttgtgggagttatttatatcctactgctcaaggtcatcgctaaggtctgatttttcacacacaaaaatttgcaacctccagcataaatgggttaacaaaccttaacaaaccccacagtatggaataagcttttgttaaattaactgaaacacatcaatcaattcactaacttctctcctctgtcctgtatcaaggtttttaacctatctttgggctcaaaagaattttagacattgagccaaaaaagacagcaaatggattttctgattagaatgcttataaagagatattgaggatgatgtttcagaagatgagtcactaccccatggcatgattatctaatctcttcactttcattttggcatggtgacagacctaacaaaaaaataaaagctttaaagttatatttctgtatctttaaaaggttagaggcaacttcactgaacttgggaggtatttagttttgtaacatgaggcaaaatctcactcacttttttgctaaattcctcattttgtgaaatagcaatgcaaacattgacaccgcaactcatcctgggagtttggaagcctcattttctctgttttattgtgatattttacactgatatttctttccacggatacttcatggcattcataatgagatgtagaaaaaatgagataaacagatacaaagtgaaagtaaggagagcacagatacaatagaagatgaaagcccaggctaaagtgaagtgtggcatgctggttcaaaggtgagccacagattcatatttgagctttgtcttgaccgaccaaaatgaagttatgctatccactaggaaatcataagcctgtttctaagagagcaaaccttttcctgactcgtgaaattgatagtgtattgtcaaggctagtgatacatgttgctcaattattttctcagaaatatctggtgtcagtacccgcttatcatctgtgtgagagtactcattctgactccttttcctgaactttcggtgttctcatttttaaatcattgctaatttaaccaaagaaaaatggtatttccatgcgtatattcattgcagcactattcacaatagcaaagtcatggaattaacctaaatgcccatcaataatagactggataaagaaaaggtggtacatatgcagccataaaaaggaatgagatcatgtcctttgccagtacatggatggagttgaaaccattatcctcagcaaactatcaggaacagaaaaccaaacactgcatgttctcacttataagtgggaactgattgatgagaacacacagacacgtgagggggaacaacacacactgggtacctgttgggggttggcaggagggagagcatcaggaagaatagctaatggatactgggcttaatacctaggtgatggggatctgtgcagcaaaccaaaatggcacatgtctacctatgcaacaaacctgcatatcctgcacgtgtaccccgaccttaaaataaaaattgaaataaaaaagaaaaatgatatctcagttaacttccagttcatatataattagtgaagatgaaaacatttttcatacttttattaatcatttgtattaacttgtatgaattgtcagtctgccttgtatttttttaaaaggggctttcattttttattgatttccaccagttgttaacgtagaatgatactgaattttctgtgtctcagaggcagtgtatctttatatgtaagatgtttagaagttcaagactttgagaagtggtatttaattctatagtatcatcaatagtgacctaggaaaatcctttaaaatggaatttgaatgcttttatactgagtgctcactttaggcacagacctcaccattccctttatgtcttaccctttatgacctcccaggtcctttacaggccatttaatgtgggactcctgtcctcgggcacttaatgtttctggtgtgtagtttccctgcataaaagagcttactgtggggggtgaccagcccttagaaaacctggtacatgctgcctgaactccagtaaagttaaaatttgtttctgagtttcttcttgatttttttccccatttgtaagatttgttttttcacctaacatcaaaagacatatttcccaccattctaacatagcatggttatttttaagtaagtgttattgtaactgaactgttattatggcttttctgattatgctgaagctctggttgtccctgagagtttccagacagggttaatctctcttctaataattattggcttttgatcatctcccagattggaagcaaggagtacctgtgtgagaagagggtggggctgcttctacttcaccagcagctttgaggtttggtcagaagtttctggtcctataataccatgaaaggagcaccaggctgatgtaatataggtagtgtttcttagctttcagaaacagagacccactcaagctaactcaggaaagtaggaatttgctgtaaagtgatggaaaatctaagaaccagaagctcacaggaacaaatgctagtgaacagtttggctgtctgctataattcaattgtgattttcctgatatcttcttctttatctccttctgttggctggttactttctcaactgtcttttatttgattaattgattgattgattggagacagggtcttgctgtggtacccaggcttgagtatagtggcacaatcatagctcactgcagcttcgaattccttgactcaagtgatcctaccacctcagcctcccaagtagctggaactacaggcatgtagcatcacacctggcttagttgggggtctcactatgttggccagactggtctcgaactcttgacctcaagcaatccttccaccttggcatctcaaagtgctgggattataggcatgggtcacccctcaactgtctttcagttcagattttcaagacagccagacacagcccctggtgtagtctggtagcaaaactccatccatctctggccaatgcatagattggctgtacttggtccaaacagctgtattgggtaaggatggacaactaactagggccacagagccatgggccaggttctggaacatcaggagacctggactgcaatcttagcagtgaaaccttcttcaaggaacttggagattctgccctgcagatttcctagcttcagagtgaaaggacccagctagaggatctttggaggcttgtgatgtcatgactcttcattatatgtttgttatgtgacacttaaaacagattgatccatggtatagaggaaaaaggaaaagaaggaaagttgggcgggacaacattaaaaaaatagaatagaaggtatttcatcgcttgtgcagactgaatgctaatatggctttacttattttgtcttgtgttttgaatcacctcagtatgagacagtacacttgaaatgcatatcaactccattgctaaataattgttagcttgtctgctgttttgtattcaacatgactgaaggaatgctttaaaggaaaatgcgtaattgcgtggcaaatataaatttcatttttttttttttctgtagagccaaagtcctggtgataaggaagccttaaaagtggaagattccttttagcaggttcttctgttcctatccttctaagacaaattatgttaaagagctcaagtttaaaatggtggtttttcagtatctttcacattctgattatcagcagctagctagctgatacttacagtaaaaactacactgaaaatttacatttaaattggacatactatttagatagtgtttaactgctgtagagtttagggtattattttatgcaacagtcataaattggttaagaggtaaacgttttgtgataatgtgtcaaaacagactagtgtgttttgggatgtgggcaggctgccatctggctgtctcataagggagtctgtcacctggttaaagacaagagggaaaaagcctgtcccatccctgtaattcacaatccttagactggggtcagtcttagtgccaaaagatgactttaaatgtgattatctcttaatcctctgtttaaaccactacccctacacttcaaaagattgccctgcttgttaagttggttcttgcttgagattaatgagtctttaaaagtattcaacaatggccagattgtcaccctcactaacttgcattgaacggaatagaattaggcgtcagagattctgcctagtccctctgaagtggaatctgtaatttagccttagttaaatattaagtaaatgtctctagggggtttattataaaaactgcattggtttggttttgaaacacaataaggaaaaggtttggttttagtgtaggtttaaaaaaaagaaagctcttaaaactggacttgtggtgaacaaataagtttagatctctctaattatcaaccatctttaccagaaaaatgattctctttttttatgatgatgactggaaaacgtgctcacattcttccgtccctctctccttccttcctgctgccccttccccacagctgctaagactgcaatgctgttggtggagtagaattgtagctgtcccagatagagcccgttgttcccctcacccccaggatcatttctgatgcttcatttactgtatcgtgtggatggatgggtaatggctttaaagctttgtcaggtagaaaattgtttggatcatcaggatcctggaggcaggaaacttttaaagatgaaattcggttggatctgctaaagtgatgcaaagaactaaacacttcatacagagttttattgtggagttcatccttcttccctccttttggacttatgccagctgtaatgtcttaccgagaaaaaacaaacagtcattgccaagttacatgtagaccccaaaccaaggagcatcctgatatggcagagggtaaggaactcagtttctctcttgctgtggctaaacctgattcctcctctactgcctgcaggcggattggtccccatagaggcttctttacaaaggcactgttccagactagattttgttccaggttctctcctactcatttgtaaaacaagaggaaagataatgagccaatttgtagaccatggaggactttcagataaaattttcaaacaaaatcttaattttctctctctcttttttaaaccaatcaattccactggcaaagctgccgtcttgaattgttatggttctcatggaagctgttcactgcccctccgctacatgtacaagtactttacactcaagaacccattttacagatgagtacaactgaagtccaaagagatgaagtggcttgctcaaagggacacaaccagtaaatagaataggtagtgttcatccctggcgcgctctctaaaccccatccattcttttccactgcgccatgttgcctcagatggcgaaactttactcttctccccagtccaattattcagaaatgtgctttgcctatttggttggaaaggctctgtttagcattacagtctcatttgcaagtgcctatatctacagcagccatatgtcacagattttctagatattttccttccagttctccatgccttggtactggtgcgtccccttcccacccccgcatttgacagactgagtgtcccagatttttcacacgaactcgaaaggccagagcatcacagggacctagcagggcggagaagggctttggtacttttgtttcggagctggaggcctgcagagggctgcctgcagatcctgtgggcttgtcattcctgggcccatgttctacttccttatcctattctgtaaagcagccaagtggaaaagaaggagtgagggaaagagcaggccctttgtccctgttaggagctagggatttgacctaaggggactgggtatttttcttgtcaattcctccccctacacgaatttcccaggcttcttgcctctgcctgccttcatcttccccacaccccaggcctgtccagctcctgtgtgagtgacaaggagcctccaactcctcaccagctctcctgtcgcatttgagggttagcaagtgttccccatgctgggaaggggaaggagaggctttccttggttaagtgctctatctgttcacagctaaagaggccaccgtttattttggcctctgggattttctgaaagcttgagaactgcaaaacaaatgcagtctttaacttaactgctgttattgcttctcttcccactcctttcaccagcacagggtggggcttcccagggagccctctctagttagagggcccggcctcagggaactggccttgacctccattcctctcttgtgggtttggctgccacaagatgcttctcaggctcttttggtgtagtggcctcgatgggctgcacggtggcagggaggtgctgcatttgctatgcggaagctgggccttagccagctgaggctacctctgggaaactgaggctttctgaatttgactccatgggtgccagcccctctctctggacatctgccctcccccagcattcctgaccatctcctggtgcctgaagccctggccagtggtctccttgcttgcgtacccttctttttattattattagcatcatcgttattattattattattccgtcctctgtgaggtggaatgaagggtcttgaataaataatttgcaaagagccacaatatggctgcttatgaataaataacgttatagaatttgtaaacatgagccacatgtggctgtgtggccatagtttggctattccttcagtgagtatggactatttgccaactttcaagatattcactctctgtgtggcaagggccatcatttacaggtcctgactacatgctagatgcggggttgtggcctttataaatattcttgagcgaagtgtaggcactactattatgactctcattttaaggggaggaaaccatgtgagaaggccagccgagctgacatggccagaggtgtagagcctagattcgaaccagtaactctctgattccagaatcctggctatgaacttctgtactctgctctaaccttttcccttaattatggtatatattaaggcttttttttgtctgtattaaacatgttccaacaaatttcatttttcattttgtgggtagtaaaccacattaattaaaaattttaaatttttaaaaattaaaatttttttcttaaatcctactgtttgatttgagagtaagtcaccttttccttccatcgctctctctgtcctttgttgtgtttgatctcagcatacagtttatatcgtgcttaggataagtggtttgacatacgattagaaatgacttataactcatgatgaatgtgtgagaaacgggatggacattggagaagactcatgagtcttttaacctaaaaggaataattgaatcaaaggatggtttgttcctcttaagaattaggtgacctggtttataatccaagtgaaaattgctcagcctctatttattttacctagcccatgtttttctagtaaggtagaatgagaaatccaaagggaggacatagccaggttgggatgcgcttatagcccgctggatgttacaagtgtgcaatgaattgtagttcggcctttactaataactaacaaattgacatttctctgggcctcagttcaaccatctgtgaaatgtgaagttgaacaaaatgaccacagggcccctctcatttggaaagttttatgatgataaaaatactggtggtgatgcatcttataggatatttagtgtttttcatcatatgccatggcttcaaccatgcatctgccgtctgttgtgccaaacccctattaacctcactagagaagacaccaggttcaggaggccaaagaagagacctggagtgagcaaacgagacatggggttttattaggggctttcacaggagagacagtccggtggcagtgcgctggcaacatatccatcctcctcctgtccagtggtggcaggctggacaacataaccacgcagcccagtggtggtgggctgtacagaaaatctgcaaccgcttgcaaatagcatgcagtttatatagcatgtcacttaacacccacctcccttccaccaataaagaagagttccgcttggcaaccttcatttaactcaactcagggcctcaatcccctctacaacccatactccacaggacaggagtggggctcagatgtttatcatagagaacaaacgaatccacacattggccactcctggattccctagctcagaacacacattcaggtgcatcagccttacagggtcattctaaatgtgtgcctaaattattgctatcaggtgcgtttaccttgcaccctgtaaaatctctccttggtgacccccacataactgactgggttggtttctaccaattttcctgtggtcccccatgatagggagaggacgcaatcattaatggtcctctgtgagaggggtccttagggacaggggtcccctaaccctgggccatggactggtactgtagcctgttaggaaccaggtcacacagcaggaggtgagcagtgggtgagcgagcattactgcctgagctccatttcctgtcaaatcagcagtggcattagattctcttaggagcatgcaccctattgtgaactgtgcatgcaagggatcgaggttgtgcactccttatgagactctagctgatgtctgatgatctgaggtggaacagttttatcctaaaagcatcttccctcacccctatctgcagaaaaattgtcttccataaaactgatcccagtgctaaataggctgggaactgctgcttgagatactggttgaacctatcctaagtttgagtcactaggaatcatgtggccttacaaatacaagcccaaagggtatggaattccatgtgagttcagggctcccctagtccaggcataaaggtatgaagaacatcaaacatgcaagccttactctcagcttagggggatgtgtgtgtgtgtatgtgtgtgtgtacaaacatagacacacatataaattcattgtttgcatagcatatactcagatttaatagaaacagatgttaggtttttgttccttttaaaattaaatttcttctcgcattcacaggcactgaaatcagaggggcaaaaatgtttgttcaatttgaaaatgcttttcaaatacatagcaatttgattctgggggttggggaatgacattctgaaggttttccaaaaacactgtaacttggaaattagcaagttgcgagcagcagtaagcttgcttccttttaaattaatattggtgaaacaaacaaaggctaaatgagtaagagagttgatttgttttattaggccttaattgaggatctagacaaaggagaacattaaaccttgtatttactacaaattctacaagtaattgcacacctgtaacactactgccagcaggatgaacccatccaagcccaccctcaagggtttcttaaacaaattctgcaaaataaatagaggttgaacaattttcaatgtttgtctacataactgaaaaaaatatttagcatgaaggaatagacacaaggtgatggactaaaagtctccatttttttctgtagccagcaaggactgtatgttgactgttaattagaatgtattaagaaaaaaaaaaaaagatcagggctcattgacttgggtaagcattttaaacaagctaaaggttgtttcaggactttgtctttttggaggctgaaattagaaatttaaacctaaatttataccatagaaagcttttagaatgtatgttagagactgagctttaaaaaaaaaaatcaagtcttctaatctacaaagaatggttgactgtcctacagggcagtcaaaagggtgtgtctttaacactgaaaggattaaattattaaaactctgtgggcggtgtgcggtgacttacacctgtaatctcagcactttgggaggccgaggcaggtggatcacctgaggtcaggagttcaagaccagcctgaccaacatggagaaaccccatctctactaaaaatacaaaattagccaggcatcgtggcgcatgcctgtaatcccagctactcgggaggctgaggcaggagaatcacttgaacccaggagatggaggttgcagtgagccgagatcatgccattgcactccagcctgggcaacaaaagcaaaactctgtctcaaaaataaataaataaaataaaaaataaaactctgtgaaagcctgagttgcagaaaaccaggtgcctgtctttgtttaaaacatttcagctacctaaaaggatgtgtttaaggatgtgctcatctgtgtctagcccttgtggatgttaattttgagtaagtttctatattcatgagaaacatatttttataaatttttatgtagaagatacaaaaccacctagaacctttttagtatgtcacctttaagattaaaatataaagagtcatgcatgggatggaccctggttcaggaaatatacttggtaagtggaacaggggttttctgggtgagatcatcctaaaagctaaggggaacaggcactcaaatcaaaacccaggcaatgacaaatactcttatggggtcacttggacatttaccagcctttgcaatctaaaattccaagattatgtacatttattgttttgtttgagttctttttgagacagggtcttgctctgttgcctaggctagagtgcagtggtgcaatcacaggtcactgcaagctagacttcctagacttactagacttaagtgatcctccaacctcagtctaccaagtatctgggaccacaggtacaagccaacacacctggctaatttttttttttttttttttttgtaaaggcaaggtctcactatgttacccaggctggtctctaactcctgggctcaagagatcctttcatcttggcctctcacagtcctgggattacaggcatgagccactttacccagcagttatgtgcatttgaacactagaggttgatatgagtgagaagacaggcatgagccttagtaatccttttaaaagcatctcataaaacagcttctgaatcttgtattcttatagattcatcaggcctaggtttccacttgcagttttttggttcgtcttgtaaccctgaacataattcattagttatctatagcaacactttcttcctaaactgtgtcttggtgtgccactaaatctgtaaaacatgtaaaagaagattttattgtgcttgcccagtaggatgatgtgattgtactccagtaataattgtctcatgccagcttttcacccctaggaaccatgagtcagttattatttctaaaaataatctttaagatggcatagcacttccaaatatatatttttttttgaaacagagtcttgatctgtcacccaggctggagtgcagtgctgtgatcatagctcactgcagcctcaaactcctgaactcaagaaatccccctgcctcagcttcctgagcagctgggactacagatagctaccaccatgcctggctaagtttttaatttttttgtagagacagggtctgttttcacactgctgtaaagatactacctgaggctgggtgatttataaacaacggaggtttaattgacccacagctctgcatggctggggaggcaaaattcacaatcatggaggaaggggaagcaggcacatcttacatggcagcaggcaagagagagtgagcaagagtagaggaaactgcattataaaaccatcagatctcatgagaactcactatcacgagaacagcatgcggggaaacctcccccatgatccaatcacctcccacctggtccttccctcaacaggtgcagattatggggttaccatttgagataagagttgagtagggacacagagccaaaccatattattctgcccctggcccttcccaaatctcacatcctcatatttcaacacacaatcttgccttcccaacagtcccccaaagtcttaactcatttcagtattaatcaaaaaatccacagtccaaagtctcatctgagacaaggcaagtcccttccacctatcaaccagtaaaatcaaaaacaagtcagttccttccaagatacaatgggggtacaggcattgggtaaatacattcattccaaatgggagaaattggccaaaacaaaggggctacagaccccgtgcatgtctaaaatccagcagggcaatcattaaatcttaaaagcttcaaaatgatctcctttgactccatgtctcacattcgtaagagtgcgctcccacagccttgggcagctccttcgtatgctggcattgagtgcctgcagctttttcagacacatggtgcaagctgtcaatggatctaccattctggggcctggaggacagtagccctcttctcctaaactcactaggcagtgccccagtggggactctgtgtaaaggctccaaccccacatttcctttccccactgccctaacagaggttctccatgaggcctccacccctgcagcaaatttctgcctagacatccaggcagtcccatacatcctctaaaatctagatgggtgttcccaaacctcagttcttgacttctgtgtgcccacaggcccaacaccatgtggaagccaccaaggcttggggcttgcaccctgtgaagcaatggcctgaactataccttggccccttttagccacagctggagctgaatcagcggggacacagggcaccaaatcctgaggctgcatagaacagggaggccctgggtcctgcccactaaaccgctttttcctcctaggcctctgggcctgtgatgggtggcccagatctctgacatgctctggagacgttttccctgttgtcttagcaattagaatttggctccttgttacttatgcaaatttctgcagccagcttgaatttttccccagaaaatgggttttcctttcctatggcattgtcaggctgcaaattttccaaacttttatgctctgcttcccttttaaacataagttccaatttcagataatctctctcatgttcaaagttccacagatctcttgggtaggggcaaaatgccagcagtctctttgtttaaagcatagctagagtgacctttgctccagttaccaggatgttcctcatctccataagaaccacctcagcctgaacttcattgtccatattactatcagcattctggtcaaaaccatttaacaactctctaggaagttccaaattttccttcatctgcctgttgtcttctgagccctccaaactgttccaacctttgcccattacccagttccaaagtcacttccacatttccaagtatctttatagcagtgccccactactttggtaccaatttactgtattagtcgattttcacactgctatgaagatactatccaagactgggtaatttataaacaaaggaggttcaattgacccacacagttctgcatggctgggaaggccccaggaaactcacaattatggtgggaaaggaagaggcacatcttacaaggtggcaggtgagagagaggaagcaagagcagggaaaactgccttataaaactattggatctcatgagaactcactcactatcacgagaacagcatgggggaaactgcccccatgatcaaattacttcccacctgggccctccttccacatgtgtggattacaggaattaccatccaagatgagatttgagtgaggacaaaggagtcaaaccatatcacaagtctcactttgttgccaaggctggtctctcactcctagactacagcagtcctcccgccttggcctcccaaagtactgagattatagccatgagccactgcactcagcctaaatgtattcttaactaagtctaacattaattttgtaaagcattaatatctacatttacgtatgatgaaactgaaggtgagacattaataacatcagagctcattctcaagccagccctctttttacttcatcgtactgttaggcctaaaattaatgatctctttggagtgttacataagatttataggaggctattggtttggcccaacagaccaaaccaaaatggagtcactcatgctaaagttccacatcaccaaatcaagactaatctgttcatttgaccttctgagagagaatagccataaaggccaatttcagtgggcaagctaattaatttccctctgttttaatctttataaaagaacaacctgatgtcaactcatcagtcatttttctattattctatttccctattcccacctttcaaggaaagtaacttcaaaaccaccaaactgctttttgttctctgttttggctttcctcagcccttccctgtctgtaaaaccagcctcctctgctgaacccattggaacactccttctattttatggaatgaagtgttgcccaattctagaatcgcaaatgaagccaattaagattttcaaaggatcccagctgcactgagcactgggaagaaaaaagattttttaaaaaaatccttaagctaaatttgttgtaatttcgtcttttgacaggaggaaatgaagagttttggaaagggcccaaaaagctggactgtaggcggtagagatagagagaatgttcacgaatgagcaaatatactccttatgaaatttcagagaaatgggtaatgagactgactagtcagggaaatgctgggaggaggcagcggtggtctcccaggtcaccttgccagcccacggctgcccaacttgcacttgtgtcttcactgaatagctatgtgttcacatgagacatgccgagggcgccagcttggccctgcgtgtgcagttccatgacagtcaccaagtggtccacagtcacatacgtatccaaaatcttggcgtgaggctttctctaaggggagctaaccaagagcataaattaacctccaaaacaattgtataactagtcactgtaagatatatggggccaatgagagcaggatttaaacatttgccaaagactgtacctctcttttttcccccctcttcattttaaaaagaagtttgtctttttctctgtgctagaagtcatggccttgcctagcattagtctctcagaaagtttctggagacttttctttaactttcccttaaaatataagagttgctgaggcaggagaattgattgaacccgggaggtggaggtagcagtgagccaagatcgcgccactgcactccagcctgggtgacagagtgagactctgtctcaaacaaaaacaaaaacaaaaacaaaaacaaaagttgctggtggtttgaaaacctgaaggagtttgctaatgtcagagcttactttaaattatttgcacctagccaggcatggtggctcatgcctgtaatcccagcaccttgggaggctgaggtgggaggattgcttgaggccaggagtttgagaccagcctgggcaacaaagtgagtccatatctcaacaaaacattaaaaaattagtcaggtgtggtggcatgtgcctgtgggccctgctactcgggagactgaggtgggaggattacctgagctcaggaggttgaggctgcagtgagccatattcatgccactgtactccagcctggaaaacagagcaaggccctgtctcaaaaaaataaaaattaaaaaaaaatctatctgcaccgaagtccttttatattcaaattttctcctgcaaatgaaaaactgttagagaatatcctcaagatctcttggcttaaaaatgagaggaagaaaaatggccttgttgaattttacttgagctctctatgctgctagaaaacagaaaccatgaagataatcctcccactcttttttgtgttccaagaaaggatttactacaaggaacccccaccttctccctgtggctcagataagacccacagatgcctcccttgtttattagtgacaaggccagacacagactctccaaattcccattctttggctcataaatgattagctgaactctgtaccccctggtcagtctgtacaaaatacctgccaccttgacttgaccaaactctaattaagtttctctccatctatagacccctgaactttgacccacccttaccacacagaataggctgacgtcagggtacacatggttttagtatcctgacccaccttcaccttccatttcacttccccacatccagttctcctgagccttgttcattcttccctaagtaatagaaatgcccgttcctcctttacattcaagacacttgcagacctcttggtctccgtgtcacatagtgccccgactcccttcgtgcaagaatcctttcgaatggcatctctccttacctaaatccagatttgctttttatttgacaaagataataaataaataaagcacagagttccaccctacagtacttgtgcctgcctgtggagatgtctgttaacacacgacaacatgaaacacagatgtaaaacagttcccgtccatgaggtcttcacttctcagtttgagacgctttccaaagtagtaagcagagtcttattctccagggagccagggttgttgcatttattcatttaataaagacttaccttgtatggaccctggaaattttgtattctgaacatttctggaaacattccctccattcaggcctgcgtcatctttattttgcactattgcagtagatgttctcatcagtctccctcgagctagtcttataccttcaaatccatcctccccacagcatttagtgatctatctcaaatgcagatgtgaacttttaaaaacatgtaatgtctaagcaccttaaaattacctacaaggtctctcacagtcagacttctgcctcaatctccacctctagccctttcccctgtctgttcttatctctggtgagacccccccgccatgccctacatatccagtaggtacatattctactttgtgctccttttctggtgttcctctgcctttcatgctctcaccattcctgctaagtctcagtgcagtcatcatctctagaaaagccactctgcctcctgtgtctgcattccctcccagttggtttcttattgcttcttgaacctggcatctggcagcaattcaataaataaatattgggtaacataaataaaggctatttctacaaaagtgatttaagagatgtcccctacagaagcacccatgtaaagaggtcattgcagttcaggatgataaagatatatggagaacatctataaagtactacagtagcatcctagaggttctttttaaaatggaatggtttccatcttaatggaatggctccccattagccctgatggaaagttgggaaacaaatttggccaaggttatctcaaggtgtttgcaggatgaaaatagaaattctacacattcctgaactgctcaggagtctttaaaccagaaaccaactttatttgctttttgaaaagagtgtcagatctctttcttctttttttttttttttttttttagacggagtcttgctctgtcgcccaggctggagtgcaatggtgcaatctcggctcactgcaacctccgcctcccaggttcaggtgattctcctgcctctgcctccccgggtctcctgggactatgtcaccacagccagctaatttttgtatttttagtagagatagcgtttcaccatgttggccaggctggtcccaaactcctgacttcaagtgatccacctgccttggcctcccaaagcactgggattacaggcacgagccaccgcacctagcagatctctttcttaaccttgtaattggtgagcaacaacctttaaatgtatttagtcatttgttcattcatttaacaaacacttggcaagggcctactatgtgctaagtggtacagattatgccattggtacattattatgtcaagtggtacagattaagcaatgtacaagacagactccatcctgctctggggttcacatgcaggcaaaacagacaataacaagtaatcaatacaggaattaaatattgtacaactactgtttaggatgtgatgagggaagagcagaaacctactttagagaaggtggttggagaggggcactttgtaccagtttcctttaacttaagtcttgacggatgaggagccagcctcatgaggcccctgggggagagagtcccaggccaagaagatctcaaagcaggagaaaacttatcctgtggaggagtaagagaagccaatatgacccagcagtggtagaaatgactttcttctagaagcttccaggagaccacaggctcctgagttacttcacacaggaccccttctcagtctccttttgtgattgcagagagtgtagcccctttgggagacctgagttcagtgttgcctcaaccatcaactcaccctgagatcatggattgttacttcactgattaagacttgggttctctcatatataataagcagaggttggatgaggtgccctcaactctgtatactatgatgctattaacattaattactatgatcacttcagcagcacatatactaaaagttggaatgatacagagaagattaacagggcccctcagcaaggatgacatgtcaattcatggagcattccatttttttaatggcagccaatatatctgggacatttgaagaagccaacatggtctcccggcccaaagaaaacattaattactaaaggatcactgaatctcaacaggcatcattcattcattcattcattcattcaaaacaaatgttgtattccgaacatttaaagaaatgaatgaatgaatgaatgaatttttttttcaaaaaaaaaatttttgagcagttaagctgccagatactgttccagactctgggccacacaaaggcagagcatccactcagagtgaagatgaggctgataaaataaaaatatatagtctaaatgcaggcagggtataaagttgtgtgaagaaaaacagaaataggatatgaggagagagtgatgagaggcatgccgtgttaagtgaggtggtcagagaaggcctttcagaggaggtgtttgtgtacaggactgactttacttataatttacttataactcctatttaaattgtttatggtgagtttagaatgtttgaaatgtaccatcatcctttctggttgatttctgtgttcatatggaaaccagtatttctcagaagtctaaattctccagcaagcaagacttctgagaagacagctaaattttaaaaagtacaaagccatctttgaattggtcttttcatctttaaaacaaaacatgtcctctaattcaaatctggtaagacatttcatcaaacacggattctgtaaagacttccattgtcagcattgctgaacctcagccttacagtggaaagtggacattacacagagtagggatgtgcctgtttgccccgaaggcagattctgacaggctccagccaagactttctcattaaaaagggtcatggggaggttatgtgaaggtttgagaggtgttgatggtgtgatcaaccacccctcctaatggagcagagttaatcactcactggccaagtggaaaatcaatggctccctgctttctctcctacactttgcccgtgctcggccagcctgctcccctgctccctgcagtgaactggcatcaggcagaggactccaggattcttctcccctcctactcaaagactggctgtttagaaggagagtcatctaaccccagggcatgagagcatgttctttctacctgggagaaaccttataatgaagccttattgccaaagaggaggaggaagcagaaaagaggacgtgttgggggaaacacaagttggggcattgggggaaacacaagttggggcattgggggaaagacagtctttctgaggaaagacatcttgcaaccaaaatgcaaaggaaacaatgtccatagatgatgggctggaagcttttccaattcagtgtcatgtgagtttttagaaccttttcattaaggagatggtgagttgcctgtttgtggttgagctctaaatgtaaatgtcttcatgtttaccctaaataaggccttccatggaactgactagaccagaggtccccaggcagaagggcccaaagagtcaggttgccagtgttctggactggaacttacaacgttaagttctcaccttgggcctgactagaagtacagctgaaccctttggttggcagaagggtgttaccagcaggaagaattatgcattaaggccaaaagaattgttctttcagtgagtctggctgagtggtgttcatcccagaggtatgacagccaccacctgtgcttccaggcttggatactctgtcacataaggaagaaggttgagaaatttcctaggagagaggttaaatcttaaagttggaaccagtattatgatacagtgagatgtgagactgtggttctcagtggtagtgatggtgcaccactgggatggaggggtgagtgggggctggaagcacggagggaagcagttcagtcatgacggtcttgattctgacttccagctggatgtctcgttttcagttttgaaggagaagcaataaccagaaaaaagggagggagcaatgaggagtaagtgggggtattgttacaaacacagccagtttgagggtgtttaagaagatagtgcactcattctctagactttggacttagtttgccacacattgttggaagccaccctgctgacggtcaccgtgttggcagttgtttggaaagagtatgaaattggcttttccagtgtggatagcaatagcctgtgatatcaaactgagaatggaaacatatgttgtgtgaaaaaatggaagagtccatttggctgttcccccagattagcagatacacatccagggcaccctcactgaaaactggcattgtctgctttaagtgaattttcttccctgcatcctgtgattatggctcccataactttgttagccttcatattgagtttttatgctcgtgcatttcctcagctctccatttccttccaagcatcttaactggtaattcagtttgctcatggactgcttcgtagcaaagcatttcaccatgaaatggtgcttccccctacgtgtgtgcagttgttctagcgtgaggaaatagaaccagcaatatcagcctttggagacaaagaactcagacctgagggtttggagacaatcatctgctgttcttaccaccatttggttcaatgttaatttacctgccactgtaagtaaagtggggagatttggtcttttttaaagagaaccaaattcagacaaacagaaagcctgtgacccgtgggctttctcaaccaaagacccttagaacaagtgcacaagtgtgttagggcttgagcaggagtcacttgagcctgcctcataaatccaggtttccttcctgcagtccagctaactgttcatgggacaggagctcagtgactgtcattctgaacctggacagatgaggttgctgctgcctggcttcttggagtctttaatctctccagaaataaatcttacttatttttttttgagtgatcaccacttagatcttttctgaattctattaagaacaaaaacctgtgacagacccactgaggtgacttctagctctaacagctcactacatagggaggttctcaaacctcaaaagctgtctttttacaggagcttaacatgaaatgacccaactctgaccaaatgtgtaaggagagtgggcagttgcctgaaaaattaggtgttcgatgttaatgatgttgagcctaaaatcagactcttggtcagcaaaatggcagacctgacctcacctcatcaggagacttcctcataaacagacactgccatagaaggacaggtgagtgaggtgcgttcacattttctcttgtctcagggtaagtcaagaatagatactctctgaggctagatctctaccccaagatatactgagactgaatctcactttaatatctatgcttttttcaactaaactttttccccacaaattgtgagacatattagaaaaatccaaatagtctacagagttgtttttgttttgttaagggttggggttttttatgatggtggcagttggagaagacaggtaaaaacatttgtttttatgattatcatttttaagacaaatgctttctcaatctttatggtgaaacacaagtttacctgggtaccactagaatgaccagagttttaagaaaagtctggacagatattccttatgccaccctcacaaattttcccatttgttaggcacactcatagaatacaagtgatagaactgattttgtaaaatatgtgtgaagtaaggaaattggcctaggtaagttgggaaattttcccagttaaactttttgaaaccaccaggaatcaggatatatacattacaatgtcttgagaaaattacgtaagtttataatttagatttaaaccatatccccttcttgttacatctatggagagaaaaataagagtgactttctggagtaatttgaaaatagccaggatcctttgaaggtaaagactattgctgtccttgaattattgccaggcatactccatacaaattgagtatcccttattcaaaatgtttgggaccagaagtgttttggttttcaaatttttttggatttcagattttttcagatttcaggatatttgcatttagcattcctaatctgaaaatctaaaatgtgaagaactcccatgagtatttcctttaaatgtcatgtcaacattcaaaagatgttggagtttggattacagattttcagattagggatgctcaacctatatttctttataatatgcgctgtagataggctgctgttcacaatgttgatttctaacatctaaatggctcctgtgcaggtacacatataagtgatggtttggataaaggcagcagctgcttattatcaatacaccatgctgagaagctctagcttgctgttgctaaagccaacagtgctgggggaaatggcagctcatcctggatgctaacatcaggaatggtttatattggaaatggcaccattcctgagagaacatttacaccgtgtacgaaattctaccctttaacactgcctcaattagagagttgcattgccttttaaaaatgtgaataggaagaaataagaacttgaagtattctaggtcttcgttttaggctggttgttaagtaatgtataactggtttatttctaattgaagaaaagttacccattctgaggacatcacctagactatccttttactctaatcacctgctgttgaacattgagctttgggaggcctaaggaaatactgaaactgtatgttcctgacaaaaagatctctatttagattatgtagcccattcaggaaaaacaaccaaataatagaaccaaaaagggtgaaaaccaagagcgttgttgctaaggacgagggatgatcagaaagtccttcggttgtagctaaaactatatgttaaaatgacgatgaatttaaattttattaaatatgttatgaaatatttcaaacatattaaggctaaaataaagggaagagagcatggtgaattcttgttttaaagtgttaagagcgtagatttatttgtataggttcactttctttcagtattcaaatccaccttcaagggacatgtgagacccacttgtagggctgttcccatggcgaaatgacaaagatctcaagtccctggtaataattgctttgaatcaatgtataaattacaggccatcatgcttttttttcagtatagtgtgtaggattataatgccagtgattataatgtctatttcatgtgtctccatgtgttttattttcttaactgcacccgcattgtacacagtggaaattttcttgatggcagcaatggtattcaacaagggaagactctcaggtccttccttcttcatgggtcttggatgggacctgtatagagagaaaggaaggttctcaatgtgttggggtggaattggggcaagaattcctcagtgaccgagggcctcactctccctctcatacttttgctggggtgagtgctccaggactcttacacctcagaggtcacacagaccataagatagatccccccagtcaattcctatggccagatttatggtcataccaaaaaaacagcttgattaagtgatcattgagagcaataccctccccagatcaaaaatgggatagtggttgtcacaaaggcaaccaactggtcctgaatgtagcccgggatgctcttccaggggcccttgatgcttgcttcattgcctccttgatgtcattatatttggcacctttctccagatggcaaatctcattctcaacacactttccacaccagcggtggggacttggaaagccaaatcagtgaactctccgttcaactcaggggttgtcttgcacacagttttggcagggccagggattgagagataatgaccactgacatgacactacagcttgctggaggagtaatcatgatctgtggggagcagtgatggcgtggactgtggtctgagattcctccacgttagcacagtcatcatcgatgacttctgccaggagagtcaagcacttggtatgcaggtgacattgctgacaatttcgaaggagttgtcatcttcacagttctctcccattctgagcacagcagcattggcgcaggtgataggaataataaccctttgcttccacctttcaagtgattgctagccttgtctaagacggtaaagagtgcggtgggctctatgatgtattcaacatcatgttaccccatttgatgttggggggatcttgaacttggaaaatgaaggtaggatttcaattgactgcacttactgttctcagccttgatgatgccgttgaacttgccatgggtagaatcatttctggacacgtagtccctattgctgaggtcaaggaaggagtcactgatggccacagtatccactttggaagcagcctggtaactaggcacccaatatagacaagcccatttaatccagcttttacagtcatgacaaggtgaggaggctggcactgcaaaaaaggtgaggcttctatttagtggagaggaactgagagagctgcatgggttttaaatacgaaaatgaaagcaatacattttaggccaagtccaggaagcaagcaaggttggatagcaaggcttacaagttgttcaaagccatttggttcctgaatttcagatagcaagtaacatgagttttgatagcaaagaatttatacaaaagtttatctaaatacattcagcttcagattccagagagcaaaaatttggatagtgagagatattcatatttactgcttgcttacaggcacccacacatgcatgcattctctcagtcattcatttaggacctcggcttattgcaagagctgggagatgaaacaaccatcatctaaactagagataatcgtatgaaggtgagtggatatatgtaactgcataattgtaaaagaacaactatgattcccaaagtgcccagtatgtgagatgagcttgttttggtttagtttaaatatgtacatcttggatggaatatacagttgatctttaaacaacatgggttaaatcaagtgggtccacttatacatgaatttttaaaaataaatatattgaaaacttttctgtaaatttgcaacaatttggaaaaactcacagatgaaagatgtagcctagaaatattggaaaagttaataaaaaggtatgtcatgaatgcataaaacatatgtcaatactatgtatgttattatttactaccataaaatatacatgaatctattatgaaaagttaaaataaaaattaggccgggcctggtggctcacacctgtaatcccagcactttggtaggctgaggagggtagattgcttgagctcagaagttcaagaccagcctaggaaacgtggcaaaaccccatctctacaaaaaaatacaaaaattatctgggtttggcagcaggtacctgtagtcccagctacttggggggctgaggaaggagaatcatctgagccctggaggtcgaggctgcagtgaactgtgattgtaccactgcactctagcctgggctgctgagtgaaactctgtctcaaaaaaaaaaaaaaaaaaaagtagttaaaatttactaaaacttatgcacatgaacacatcaaactatatatgacgccagtcacagtttagggaaattaaacacatgtaaagatgcagtattaaattataatggcataaattaattgtactgcatgctgcacctactgtaataatttcatagctacctcttgttattgtagtgagcacaagtgttctgattatccacttaaaacactgcataacgctaatcacctccacgtgaacagttgtctctccaggaaattacatcacagtaaaaagtgatctcttaaagttctgatgtatttttcatcatgtttagtgcaacactgtaaactttgaataacactgtgggacccattcaaagtgcactagtgatgctggaagtgctgccaagaagcagaaaaaagctatgcaattacaagaaaagctatgaaattacttgatatgtaccgtaggttgaagtctgcctctgtgattgccgccatttcatacagatgattcatcttgtaaacagttgatgcgctgataaacacaacacagtactggaaatgtattttctcttttttatgatttcttaataacttttttagcttagcttactttattgcaagaatacagtatataatacatataacaaacaaaatatgtgttcatcagtcgtttatgttgttggtaaggcttccagtcaacagaatgctattagtagttaagttttggagaagtcaaaagttatgcatggatttcaactgcacagggcactggtactcacaaccctcaagttgcacaaaggtcagttgtatattacaaaacataactaacgatcagatcattatctcacaagtgtttcactaaaaggaagtaagccaatttaaagaccagtgttaaagaaataataacatggcttagaacttaaagtataataaatatatatatattaaaaaaaagaaataatcacatgggtggaccatgagtgtggcagaatctggaaggtggtttgtgactgtgtttgaaaaagacttgggcagagtgatctgggagcacagagaaaacctccaaccccagcttggtaggagacccacagaaagtgtcccagtgtaggtccactcatattccacttaaactattctgactccatcttgaaaattttaaagaactagtcattaataaagaggaatgataatgcttggtgatttagtgaagatgattggtatagaattcagctgttagcgcaaatggcttggtttgattttcctgagtttgttagagttttaacctatgaaaaagtcctggtgcaggttttactgttttggatgcaagcagaagaagaaagagtctttggttagtaatcaatcggtcaaaactgaagagggacttctctccagattggatattctgagactatctttaagatttgtggtatcacatttagagacaggaatcgttcatggttttaatcagatgagaaagttggacctggcatgtgactaacatgtattgcattgttgccatcaggggtttgtaaagctaaaggttttgatcttttaatattatttcttagtcttttcatggtcagtaggactgacaattaaaatttatagcaatgtgagggaggaatctagtagaaaagggttttcttagcaatgcttctgttgctatcagaagtaaatttttgttatttgtttttgcatgaaaaattgaaacatcacacaaggtctgtttgcaaagcatgtctcctgcccactccagatctcagttctaatccccttgtgaatctaccatgcagtttcccatgtacctatatgcgctggtatgtaaataccttttcaaaatataaatggaaggaaaatatactcttcagcctcttgctttctcatttaacagtatatctcataattttttaacagttacataatttatttaaccgtgtcctgtcatgaacatttagctttgctctcagattttgaccgtggttgactgactgttcatttgtttgaaggagggtgagcttatgcatgattttcatgtttgagtgtgctctacatttcctaggactgaagacactcgttccctcagtgggagtcatttggatgtgatgtccatctaatggcaagtaaaggacactgatcctagctttctgcactattcattggtgggatggtagggataagcaattttctcatcagatgtgatatcgtaatctctcagccccaaggacactcagcgtcctctattgagctccggatggatctaaagaattaagataatagagtttgggtttttaaagcatagataactattctcatgtattatacatatgccctcaattcacttagattcggtagtgagtttgtgagatgctagacggcgtggtgtggtgaaacaatgataaaatttggaatcagaaaaccaaattcaagtccagcttctctacactggcatcattattgttgacaagatactcaccttgtctatgcatcaatttccttatctgtaaaataaggatgatgtggacattgaaatagataatgtctgtgaaagtatacactaaaaacaatcattgcacaaatgtcagttattatttaacccaactcctttcttataatgaaagggaggctcaagaggtggaaagtggctttcctaggcatatacatacatctgtgatttaacaatctttgtacctttagtgtttgtcttcaaaaatttcaaaagcagagctgagctttaaaaagagggaacattggaaagaatgagaaaatgttgtaacttaatttttctcatctactctttgtgctttagttatttcatctctatttttacaaaacttgaaatatataaatgtcagtttgctgattatcttctatgatttatggtgcttgctttgttttggtggtttagacatgagtagcactgtactagtttgaaattaaaattgcttctcccagcgttacacacacacacatcacatccagcaaaaaaagcaaaaaagctctgaatttaaaaaataaaaataatgccagaagtatgagtggctattcaccagttggaaatagcttttcacactggatggtaaacagtagcctttagagtgtttccaaataaccatcaccaagaattgcttttaattcactcccagacgctaaataggagaccacagagcactttgtattccaaggagaaaaaaaaaagactgaacattgaatagacaaaaacacaatctagtgcagtcaatctcttttttgtaagactgttgatttgagaagcttccatgatgacccaacataaagaagaggtgaatgtttggggtgatgggtgtcccagttgtcctggtttgatcattacacattgtatgcatgtgtcagaatatcacatgtccccccaaaagatgtataactattatgtattaacaaaaaaaaatcagtataattgttatgacatataatgatatactaattttgataagagcaatattttaggcattaataaatataatgtagcttttaaagaaagcctccaaagctaaaagttgttctgaaaatgaatcctgtgtacttatggttgtgagtagtggattttcagcagctctctggtatgtactcacttcagtgccctgtggacgggcagaattgaacaggatttttgaagaaaagactattaatagttctaatagtttgcttcttcttctattctgaaatcaatatgtgaaggcattgcaataacattttggaacaagagacttcaagaacacatagaaaaggtacaccaggacttatcttgatgtctcatttctctttctttttaaaattgagatataatccacatatgataatagtcaaccttttaaagtatacaattcagcatattcacagagttgtgtaaccatcaccactatctcacttcagaacatttttaccccctgaaaaggaaccccaatatccattagcacacactaccgtaggcagtggggctaatttactttctatctctatggatttgcctcttctgaacatttcatgtaaatggaatcatacaatgtgtgtccttcgtgtttgacttctgatttcactcagcattactgtgttcaccagtactttctttctttctatggccaaataatattccattgtaaatatatagcacagtttgtttatctgcctatcagtcgatggacatttgggttgtttaaactttttggaaactgagaagaatgaggctaccaaatgctaacaacatttacatacaagttccagtgaggacacatgctttccattctcttagggatacacctaggagtggaatggatgagtgtctggtgtctgtttatccaagtcatcttactggtaagctgagaaaaaaagggaatgagatgcatttggataaattaagaaacaggataggtacgtactggtagagaggctgtggtctttgggttacagctcattgttctcttgcctccaacagtcaatgacataaccagttcctgactttttggaaacaaacccgtagatagactgtaaatcccagcagtttgcagtgtttctaccccatgagacatgaggaataatcatatgctcctgttagttaacagcacatcacttttgctatttctccatggtggagggggctatgagtgtagccaagggaaggaaaaaagatattgggatctttcaattttttttaatatggtgggtgtaatttgaaaagagcctcttggtgctccgttcatcctgcagaggacttaggttttattatgatcatatggagcctttgctcttttcagatgagggtattttgcggggatgaagacaaacaggggcagctccgtagtgtatacaaaaatgtaaacaaaagtgtaaaacagttcatcatgtcctgttttccttcagggaatggaagatgttaacagagagaaaagtttgaaggcagacattcagaagaagctaggaggagaagcgtcttatattaatgtgggccaaaaatggaagtgtggcttggctttttaaaatcctgtggctggtttactagtaataatgttatttcaaaatattttgttttcaaaattatttaggtgttatttatgctagtgtaaagaataaagtctggctaattggaaatgtgttagacatggtacacactgtcattttttactgtaataaccagaaagggccactacactaagagaaaaagtgccgttttctctgccgtccccatatgagcccagccatccagaacagagcccatgctggaagcttttccacactgtaaggacaagtttcatattgaccgcattggttccctggaaaaccttttgtctgcctggggtgaatggtcgactatccagagaaccagattttctttctatctatatattacatttatcctgcattcagagcagaagaagaaaataggctaattccccttcgtgaaaacctacgggacctccatgccatccttcaataccatgtgggggcccctagccagtttactaaggtgttaatggtctgtaattacttcccgtgttgcctccttatgggtttttgctttcatgcacaggactttagggcctcaacccaaagaagtatgatggatgatggaacttaattgggtcctttttggaaagtggcctcttcaacaatacagagaaaagccctccacttagggcaagccacacgttgagttaatcgttatactctttaactgataattaaatgaagaaatagttctctgctgccacagtaatttttattcttttgagacagggtcttggtctgtcacccaggcttgagtgcatcatggctcactgcggtcttgacctccgaggctcaggtgatcctcccaccacagcctcctgagtagctgggactacaggtgttccccaccacacccggaaagtttttgtatttttttgtagagacagggtttcaccatgttgcccaggctggtctcaaactcctgggtcaagtgatccaccttccttggcctcccaaagtgctgggattacaggtatgagccaccatgcctggcccgccacagtggctttttaaaataaacttttatttatttatttatttatttattttgagacagagtcttgctctgtcgcccaggctggagtgcagtggtgtgatcttggctcactgcaagctcctcctcccgggttcacgccattctgcctcagcctcccaagtagctggaactacaggcgcccgccaccacgcccagctaattttttgtatttttggtagagatggggtttcaccgtgttagccaggatggtctcaatctcctgacctcgtgatccgcctgcctcggcctcccaaagtactgggattacaggcgtgaaccaccatgcctgttctaaacttttattttttttagagaagttttaggttcacagcaaagttgagtggaaagtatagagttctcatataccttctccccacgccacatacacacaacctcccccactaccaaaattccccgccacagtgatacatttggtacaatccatggccctacattgacatatcattatttctcaaagtctatagtgtacattagggttcattcttggtgctgtatgtttatgggttttgacaaatgtagaatgacgtgtctatccttatagtgtcatacagaatagtttcactatctaaaatttctctgtgctctgcctgttcacccctccctctcctcagtccctggaagccactgatcttttttactgtcttcatggttttgccttttctagaatgtcatatagttggaatcatacagtacgttccctttgcagacaggcttctttcacttactgatatatatttaggctcctccatatcttgtcatggctcgatggctcattttttagtgctgagtaatattccattgtctacatgaaccacagtttatttattcatttacctactgaaggacatcttggttgcttccaagttttgacaattaaaaataaagctgctataagcatccttgcacaggttttttgtggaggtaagttttcagttaacttggatgaacaccaaagagtgtgacatctgagtcatatggtaagagtatgtttagtgttataagaaactgccataccatcttccaaagtggctgtaccattttgcattcctataagcaatgaatgagagttcctattgttccacatccttgtcagcatttggtattatcagtgttttggacttagccattctaataggtgtgtagttgtatttcattgttgttttaagttggaattccctaatgtcatgtgatgttgaacatttatagtaatgtttttaaatcttagacaaagctattcaattctgccagacccagtacttcttttttcttaaagcatgatgattccattttattggacaaataacatgcaaaggagctaagcagactttttgctaatgtttcattttttatgctgtgcgggaaaaatgatctcgtctatcttattctcagtggtattcccccaaaccagcacagtacctggtccatatgattcactcactaaatatttactgtggttggttaagtagtggcctccaaaaagatatccccacattcgaatccctagaatctgtgaacattgctgttttgggaaaaatggtccttgtagatgtaattaagtttaggatgttgagatggtaagatcatcctggattatctggttagaccaatccaatgacaagttccattataagaaaaaagcagagggagagatgagacaggcagaagaagagatagaagaggaggaagcaatgtgaccgcagaggtggagatcagagtgatgtggccacaggtcaaagagtacctacagctaccagaaactggaagaggcaaagaaaggaccctcccctaaaacttccagaatgagtgtggcctggcagaccccttgatttcagacttgtggcttctaagccctacatatccactagtcaattttccatctctatggagttgcttattctggacattctatataaatggaatcatacaatgtgtgatcttttgtgtctggctcactaaatttaaaataatagcacctcctgttatattctaaatatattgtaatattccttttactttcttaaaattcatagataatatgacttacttacacatacaattttttaaataatgtgctttataataaaaataacttttaaaataagtatatgttgtaacatgtctacactaggctatttatttcataggatagtaggagccttgaacctgctttactatttatgaagcagtatcactatgaatgtgccaatgatggtagctgggacacagatatgcagtgttgaagtctcaaatacaataatcagcatttcccttgatgataacctgatttctccaaatgatgaacaattctttttttaaaaaatgtttaattttaaaataaaatagagatggagtctcactatgtagcctaggctggtctcaaattcctgtcctcaagtgatcctcctgcctctgcctcccacagtgctgggattacaggcatgagccactcactacacctggctagttcttgataaagttccaaataaaccaaagttcatttttctctcagtctacacagtagttatggccttggaaacttcagtgtacgttcataacctgcaagaaaatatttagtgtttacttgtaaaagagagttaggctctcaactcagaggattacagatggatttttcatctacatgaatgtctggcagaacacttaagagtcatgttagacacaaaaactggttttcatagagtggcactgtcctgtgcattgaaaggcatgttgcatccctggcctcctccctctaaatgccaatagtgactgcaatcactgcactgaccagaatgtcccccaggagagcatccatccctgctgaggaccaggggctgagcccttctcaacttcaaaaccacttccacatgcctgatcacctctgagtccatattccatccatttctttctcctctcttccatatgtaatttctccctgttgttattctttgtacattcatcaacccattcagcattctttcattaaaaaaaaaaaaaagaaaccacattcttcaaatctctcttctgccctactgctgacttacatcatactgcatctgttacctggattttgcaatattatcttaactgatgtccttccttcaagtcttgatgtcctcatccccactctactcttggtatcaaagggtgccatcagacatgcagatcaggtcaggccaggcctctgcccaggatctcccagtaggctaaagatccattctacaacatggtgcctcatcaccaggtcctccccaaacatctgcttctcacatttcagaaaaatattgaaccactttttttttctttttctgggatggagtctcgctctgtcacccaggctggagcgcagtggcatgatcttggctcattgcaacctccgcctcccgggttcaagcgattctgctgcctcagcctcctgagtagctgggactacaggcacccaccaccacacccagctaatttttgtatttttagtagagacggggtttcaccatattggtcaggctggtctcaaactaccgacctcagatgatccacctgccttggcctcccaaagtgctgggattacaggcgtgagccaccgtgcccagcctgaacatatttaacagctttatcaaggtataattcacgtactatacaattcacccatttaaagcatgtaattcaataatttttagtgtagtcacagagttcacacatgtttaaaatatacaagttgagggttgagcgtggtggctcatgcctatattcccagcactttgggaggccaaggcaggcggatcacctgaggtcaggagttcaaggccagcctggccagcctggccaacatggtgaaaccccatctctactaaaaatacaaaaagtatccaggtgtggtagcgcgtgactgtagtcccagctatttgggaggctgaggcataagaattgcttgaacctgggaggcggaggttgcagtgagccaagattatgccactgcactctagcccaggcaacagagcgagactcagtctcaaaaaaataaaaatatatacaagttcacacattttaacataggtacctatccctgaaatcattaccacaatcaagatgatatttatcaccccctaaagttttcttatgcccatttgtaatttcttttcccctccctagcaaccacttacttgctttctgtcattataaagtagtttacatttccaagaattttacgtaaacaaatcatgtagtatgtactgtttactttgtcatttgtcttggtctggcttctcttcattcagcataattattttgagattcatccacgttgtaagcatatgtcaatagtttattcatttttgttgctgagtagtattcagttgtgtgattataccacaatttgtgtacttacctgttaatggtaaattgggttgtttccagtttggggctattataaaaaagagctgttatgaacattcatatatgagtatttggtcatattgcttttgtttctcctgggcaaatacctaagagtgggatggctggatcatatgataagtatatgttaagaaacttatatatgttaagaaacttatcatataagtatacaggtagactttttaagaaactaccaaactattttccaaagtggtggtaccatttttgtttcctccagaggcatatgagaggttcaggtgctccacgtcctcaccaacacttgatgtgtcagtcttgtgaattttggggaacacacttagaccatagcagtaggtccccaataaatatttgtttaataaaaatataaatactgactattatagtaatttatattggtcactttctacgtgccaggtactatactaagtgttttgcatacattttctcatttaattctcctaacaaatctaggagatgagcactattttattttcatttaggaaatgagaaacttagcccttctagtggatgtgtagcagtgtgcctcacagtttaaactctagtggtcctaacctcctaggagctcccactacctattatccagcatcacttccccaagcctttcctctggctgttcttgcaacctggatgcttctttacccatcccttagttaaaccatcttccttttgatacagacagaagacagggaaatactgggtagaagagggtggtcccctggcaaaggccccaccctccagcctggaaacccactgccctaaataggaacaggcattcctgttttctcacccccctatcctgtacccatataaaccccaaatcccagactccacaggcagaaaaacagaagagcagaagagcagcagaatggcacagcagagaaggggaggagaggaagaacatctgaacatcgagaggagttccgctggggacagtcggagaggagatcggctgctggataaccaaactccaggggaagatcattttcccaccacatcccccttccaactccccatccattccacagagagccaccttcaccactcaataaaacccctgtattcaccatccttcaaggccctgtgacctgatccttcctggacactggacaagaacccaggtgccaagatggcactgagctggttaacacttaagctgtctgtgatggcagagctaaaagagcactgtagcatgcccactggggctttgagagttgcagacacacatccctagactcctaacgtggggccagagccccaaaagcatttgcccaggctccctgcaccctgcccgtctgtgtgcttcccctcctataaggggtttgagcagcagctgcagccaaacagacgagccacacccctgttgcacgtcctgtgaagggggtcagggaactctcctatttcactttaaccagccccaggttctctggccatccaggttgaaccagagttttctgtatatgtacacatactcatagaattctgtggattgtttttcaaagccttttcacattatcctctgaaatcttcttattgtgtcaccattttccctactcaaggatggggacctaatacaaggcttggctcatcatagcatcattgtcacaaatggcaatgccagaaacaggatacaaccttctgagagtgatacttttcctctgcaacttgaaaaatgtagctctattttctcctgtttaaagagagctgtgatcacagtcattgttatttgaaaattattaatgagacataatatgcagccgtagtatttttaaataaaatgaatgattttcctaattccacaaaacattcttcaaacatagaaggtgaaatataaatgaagacaaaggaactcatgaacctcaaagaaatttaactttatctgaaggagagtcacccaatcattatttttatgattctaaggtttcctgtttctgatgattttaagtatttttttacccttatcctctctgttaggatgtgaggattttaagtatttttgagggaactagcattagtagttatgcctgtgatattttgtttatgttggtgagtgaggaagaagtaggactgagaagtatatttcaagcagcttctgagaaattcccagtagtcggtaatacctgccagtttttcaactccccagataatggtcagttagttgtggtttttacaggttcacaggagggaggcagaaacataaaaagagtgagctgatttccaggagagtagttcctggtggttaagtggatggtaaagaagttaagtttcaaagtctgattcgaaattgcagctatggaattcagagtaattgtcgctgaggctttatagcctgtggatttggcctgctgtgcacagggagtggttcttggtttttagcccagagcaaagtggcagtgaagcacaaacacatatgcaacaccttctcagggggttactgggtttgctggaattatgcacggaattaaccggcaactcaaggagttgaaagaaagcacaagaatgtgggaactcctacagcaatccagctgactaatcaaaattattttgaaatagttcttcatagtgggccagctgactaaccaaaattattttgaaatagttcttcatagcgggttttgttccaagcaaggtaatgccatccatcacgagctaaataaaaccctggtaaggtcaacacagtcctggtaagatatgttttgtgattaaagcccacaacaaagtgatttgtacaagaggactatatagtgcggtgcttcttaaattcccctgtgcacatgaatcacctggcaatcttgtgaaaatagagattctaatttagtaggtctaaggagaatcctgagatgactacatgttaaagcagctcctgggtgaggctggtacagccagttctcagacaatgctttaagttgcaaaggcaggtacttaagtaaatatgttgctcttgcatattagattatgaagttgtcctgtaaatttctttgacaaagtaagttagtctattgttaataatcctattcactccttcacaaagtaaacaagtctgttgttaataatcctattcacttttagagggtatggacatccaattcttttttaaaaaaatcaactttcattttagatatgggggatatatgcgcaggtttgtcccagaggtatagtgcacccaggtagtgagcataataaacaatagtttttcaacctactccctccccgtctagtggtccacagtgtctgttgttcccgtgtttatgtccttgtgcgctcaatgtttagctcatagttataagtgagaacatgtggtatttggttttctgttcctgaattaatttgcttagtattttgtcctccagctccatccatgttgttgcaagaacatgattttgttcttttttatggctgtgtagtattccatagtgtacctgtaccacattttctttatccagtccactattgatgggcacctaggtggattccatgtctttgctattgtgaatactgctgcaatgaacagatgagcatatgtgtctttttggtagaatgatctattttcctttgggtatatactcagtaatgggattactgggtggaacagtagctctgattttaagttctttgagaaatctccaaactgctttccacagtgactgaactaatttacattcccaccagcagtgtataagcatttccttttccccacagcctcaccagcatcttttgttttttgactttttaataatagcgattctgactggtgtgaggtgatatctcattgtggtttttgacttgtatttctctgatgatttgtgatgctgagcattttttcatatcttttttcagtagatatgaacgctggtatgtcttcttttgagaacatgttcatgtacatcaaattctgatttctatcttctgctttgaaaaaaaggagggagaatatgtcttcgttaatgacctcatggaaaaatcatttttaaaaactccatattaggccaggcatggcagctcacgtctgtaatcccagcactttgggaggccgaggccggcagatcttctgaggtcaggagttcaagaccagcttgaccaacatggtgaaaccctgtctctacaaaaatataaaaatcagccaggtgtggtggcagatgtctgtaatcccagctagtcaggagtctgacgcaagagaattgcttgaacctgggaggcagaggttgcagtgtgccgggtgcagtgtgcattccagcctgggtgacagagtgagactctgaaaaaaaaaaaaaaaaaaaaaaaccctccatatcgagccctttttttttgagacagggtcttgctctgttgcccaggctgcagtgcagtggctccaatctggactttgctcactgcagccttgacttcctgggctcaagcaatcctcccacctcagcctctcaagtagctggtaccacaggcatacaccatcacacctgacaaattttaaaattttttgtagagacagggtctcaccatctttcccaggcttgccttgaattcctgggctcaagccgtcctcccgccttggcctcccaaagtgttgggattataggcattagccactgcacccaacctgagtctttatttaaagactgaaaatacccatgccatttatttgactgatgctcctgattactaaagaagttacagtaaatgcagtatgttgccttcatacaacagtggcattcaaaaagtatcttactagctgttcgagtaagaacagtcacttttgtggttaaaatttgaaaacaagtgctgcctggtttgagtattaggttatctttagtgcaggaccatcctggtttggaggtagcatcgtgtggtagtttaagcacagactttgaagtcagactttctagattcgaatcccagttctgccacttgctgactgtgtgcctgtggatgagtgtgcaatggtttactcatctgtaaaattggtctgcattctccaggtgttactagattgagtaaaaatctgcaaagctcctagaacagtgtccaacacatatataagctacgtgtttgttaaatacaagattaaaataaataatatatgcattaatgtcatatcttagttgctcagtggtcctatggaatccagaaagtctgttttctttttaccaactaaaatatcctacaagactttgccaacaagtagctggtcagagagaaaggagccttcaatcaacaacctgagaaccccaaaatatatccatgacatttggaaatgcattcattttccttatttgattagacttacctcagtcctttggttttgcagttggtgatgtatattggccaagtggccaaggatgtcttgaagtggccccgtccctcctcccctccagttgtaaaactggaaaagagactgatcgctgaatatggaatgccatccacccacgccatggcggccactgccattgccttcaccctccttatctctactatggacagataccaggtaaggtggcctggttcttcttcctacccacctactgaggcagcaaatagaggctgcacttctgaattttctcttaaagctgctttgagggaccttaaggtttatgaaataaagattaagagaaactgaaacctattaaacagatgacaattgcatcataaataaagtgactatataatttagcatttaaatcaggttatgcctgtgtgtgaacatcagcaccatattaataatgacaccaggacaactagcataatatgggccatcccaggagaccagcatgtattatcaccctgggctgcctgatgagacagtgcttgaattagtgctctcatcctctgtttgcaagaggagtttatgtcctagtaaatgattctccagggctgagatgattccaccaaatccctctgccagactccccagggcctggggccgcaaagagtctgtgcctcaaattagcctctaaggatgtctctgccctggttaaggctcagccactagaaatgatggctcaaagttttctagaacagtctaaatggcagaggattaataaatgttgaaaatagaagaattttacttaatatctgcttaaatgccaattatagtaagacttaaacagttatattattacagcaatggaagttatttttctcctatttgagacctatggatctaatcttatgtttaattttataagtgttatcttttacccattggatgttttatttgtttgtttatttgtttgtttgattttaagacagggtctctgttgctggggctggagtgcagtggcgccatcaccacccactgtagtcttgaccttctgggctcaagcgatccttccatctcatcttcacaagtagctgagaccacagctatgcaccactacgcccagataattaaaaaaaattttttttctagtgaaggggtcttgctgtgttgcccaggctggtcttgaactcctggcctcaagcaatctgcctgcctgggcctcccaaagcactgggattacaggcatgagccactgcacccagccccactggaagttttagattccattaaatctagcagtcttgtagataaatagcagtattgtttagccctgtccctttaccccagaagcccagggatgttccatattccaggttatgcagaagcaggaagtcaagcctcatgtagctggaaagaccaggactagtgtggggtcccacctctaccactgtagccttctacctggtcatctgggtttagacctctgttacataagaaagggacagttacaaggaatatatttgactagatatcatcttttgtcataagttacttaaacttcatgccggggtcaaacaatgtctgagctcctggcactgtctgaattaacttagtgcaggctgctgagccatgttgtacccaatgtcagctgccctagaaggacgtagtgggccaagcaccagctcccattgggttgatcttggtgcccagagaagtctgtgaatatgctaatgtaccttaagagaaaagcagcaagtggaggctcgcagcaggaaaaccaccaccatcaccacggacacatccattgcagagccacccagtcctccttaaaaaattctcctcaacttacatgatgtagcagttttcataaggttggagtcatgttgtgaatttctttcctatttgatttttaatagtgaatgtatttagctagctgtttgctcataaacagctctaaatattggtttatttatatattatatttattggtttatttatatacatatttatttttatatattatatattggtttatgtgtgttgagtaccccaaaaactattgaaataaaattttaaaaatgtgtgttgaggctgctgcccacactctaatttccaaatatattaactcattaattctgaacacttttaaattaaaatctgagacttagttaatgataaaccttaagaacagacatgacaaccagctgttatggtactcatgtgttacaaggggaagaacacactgggcttggactcagaaggcatggccttcagttctgactctcacttaccagctgtgtgacctcaggcagatcatttcacctctctgaaccccaagctcctgttgtgagggtcaaatgggagcattgaggggaaagtgcctttatgataaagtttattaataacgtcatttattatcatggttaagagcttcctcatttgtaaaatggggctaataacagagcctacttcatagggctatgtgaagactaaaggagatagtataaagtgctttgcctaatacagacagtgccctattgtctttgatcttcttactacagtataccacagacactagtgcttgaagcaggtggatttatgcctatgtctagcttataagcagagtatctgtgtgttccttatatgattcagcattagccagattcctctagccactagtattactcagcagcaaatgttgagagtcagtagaatctgcacaagtgcttttgatatctggacgcaaatatgccgattctgactttaggcccattgcccctccttctacggaggaggagaagttgcttgttgggattttcagattatagccctggctatctatctaccttgcttcttggtcaaattgtttgtttcttatcgttctaatttaagaataggtagaaatcaaagttattcatttcactaaaactgccagcactgtagttgtggtcatgagtcttaaagccaagtcctactacgtctcacgtgcatgcttatatgttgtgaaacttcctcccagaactgtgtacctgggtatcttccccttctctttcttctgtctccccgtttaaaaaaaagttttaagttaatcagattgctggtctggggaatgcaagatttggactagcaattcttgcattaatgaatcctattcccacctatgacatcaaatcatgtatgtctgagtgtgatctaattcccttgttttttctccttcccccacagtatccatttgtgttgggactggtgatggccgtggtgttttccaccttggtgtgtctcagcaggctctacactgggatgcatacggtcctggtaaggctttgtggtcaggtcttgtggtgattgtttgaatgatattgtggtcagtgtgtcaatatgtttctcatactacttatttataaaattatttgcatatgtaattatatttctcatcatgccaatgcattaagtaattattatgttcgggtgcatgtatgataatagtaatgaaacattaaggtaatatcaatgaggctgagctacactgaaccctcaagattttgaaaatgggctagaacagcgttggagactccggtcatttatattcacatcagtttactgacgatgcagcaagcagttcagaaaaagcccccaggctcataggcacgagtgagtagatgcagttccccacttaggtcctcacagagaggggcctgaaatcaggggtctccagtgcccttgcaaggtaagggtcccaccaggtcagaggagcccggtatcacggctttgcttccttccatactgttttaggctggaggcagtggtgggaacagagtcccatctgcatgtaaaggtccatccacccttttaccatattagaaatattttccagggccgccatgattggcacagttaaaattccttgagaattcagtttcccaatgtgtccacggctgccttgaagttccagagcataaggctggccatggtcgaccacaggggcgctatttatcatcgtaataggtacaagaaagatttctttaaaaagaaatgggcccttgctcattgtgtgtttatctcaattctgaagctcaaaagttaagttagcaaaaaaacctgggagggaaaggcctacaccccacacgggccttcttgcttctctccctggtcccttgtgtgggttttttatgggaaatgtgggagagagggggcagaagggcagaagctgcagagcgaacagattggggagatcatttgtcaaaatgaacagaggccgaagtaactcagagaagggggtttatggcttcccaagggtctatcagagagcaacattacgctttcctcttaaaatgcaaaggaaggtgctgatagcaattgactcgaggccaggcctcagaagaggcaggcaagtctccaagttaaagagtgctaaaaatctcaggaatcaagataaatcatttgaatgcagttttttaaaaaatcaaaattcatgctacaaaaccccatgatgagctagatagtcaaattttaagtgaagacaagatttgaccctgtatttgcatgctgtgcctcagctgcttcacctcagcctggccctgacctgggtgctgcctgggtgaaggcgggcctcagatcttggaaataagaaaggagcaatgaagggccagtcctgtaattttacctcccaaggcacgtccttgctgtccccatcccacgtcacaccacactggtggctcctgagatggagggaaggaggggaggagggcgttctctatttgctacactgccacttcgtgttacaaagaggttctctccaaatatgttcatagacttcaatatggaatgaagaactcttgggttctctggcatctctttttatctggggctactgtttaatttctgtaggctttaataaaatatgatcttggtaatgatagactggataaagaaaatgtagtacatatacatcatggaatactatgcagccatgaaaaggaatgagatcatgtcctttgacatggatgaagctggaagccatcatcctcagcaaactaacacgggaacagaaaacctaacaccacatgttctcactcataaatgggagttgaacagtgaaaacacatggacacagggaggggaacaacacacaccatggcctgttgggaggttgggggtgaggggaggaacttagaggatggtcaataggtgcagcaaaccaccatggcacacgtatacctgtgtaacaaacctgcatgttctgcacatgtatctcggaacttaaagtaaaatttaaaaaagaatgatctcgagaactcgggttaaagttaaaatgaaagtaagcacgagcatgtagagctacagagatgagtaaagagtacacaaaacccacctcaatagaaacacagctacagctttttctttttaaagtgagttgtggggacagtaagcagatatttaggggaagatagattaggcctgtcatccagatgcaaggaatattatatgctttttttagacataatgcagttgcacacttagtagacaacagaatagtgtaaacatttttatatgcactgagaaacaaaaaaaaaattgtgtgacttgcttgattgtgatattgacttgatggtgatggtttggaactgaacccgctgtgactctgagttaggcctggatgtcacactatgttcatccattcatctgtcagtgaacacttgggctcacctttaggctactgtgaataaggcttctctgaacatggggtttcaaatatcttcagagagatttttttagaagcttcccatggggtttgaatatgcagctatggttgagagccattataaaagacattccctagagattgtgaggggcccagggaaggggcaccgcccccttttgggagcatttgtcccagaagaagctggagcaagaggccacagcaaccattgtccccaaccccatctgttctgtcaggacccagggcttctttcatgctcataattttatttcataaagatcttagaccctgactcaggcttaggcccaggtaccagtcaggctacaggaccagagaatggcctagggtgcaatgatgagtaatttttagtagaagggaacagttggttttaatagtaggataaggtagaattatggattagttgcctttattcagcagcaacttaatcagctcctacaggcccctggacttggaatgagatctgggagctcttgtggtaaagaaacctatgccacccctcaggtgtccaagtctactgaaggagacagatgtctacactgctgattacctgacatgatgatatagttaggatggaataactggattgagccaactatgatagcgtgccccttccctgggcccctcacaatctctagggaatgtcttttataatggttctcaaccatagctgcatattcaaaccccatgggaagcttctaaaaaaatctctctgaagatatttgaaaccccatgttcagagaagccttactcacagtagcctaaaggtgagcccaagtgttcactgacagatgaatggatgaacatagtgtgacatccaggcctaactcagaatcacagcgggttcagttccaaaccatcaccatcaagtcaatatcacaatcaagcaagtcacacaattttttttttgtttctcagtgcatataaaaatgtttacactattctgttgtctagtaagtgtgcaattacattatgtctaaaaaaaagcaatgtacatataatatcttaatttagaaataatttactgctaaaaaatgctaacaatgatctgggccttctgtgagtcataatgtttttgctggtggagggtctggctcagtgttgatggctgctgactgcgtagggtggtcattgctgaagggtggaggggctgtggcaagttttgtttttgtttttgtttttgagacatctcagtctgtcacctgggctggagtgcagtggtgagatcttggctcactgcaatgtctgccttctagattcaagcaattctcatacctcggcctcccgagtagctgggactacaggcatgcaccaccacatctggctaatttttgtatttttattagagacagtgtctcactatgttgcccaggcttgtctcaaattcttgggctcaagcaatcataccacctcagcctcccaaagtgctgggattacaggcatgagccagcgtgtcctgtttcttaaaatagacaacaatgaagtttgccgcatcaattgactcttccttttaggaaagatttctttgtagaatgccaatgctgtttttttccttatttttctcccctttacatatgccaaatcatgtgatgatatttgataaccttttacctggaggagaactttcaaaattagagttaattctctcaaaccctgcaattgctttatccactacgtttatgtaatattctgtcctttcttgtcattttaacaatgttcacagcatcttcacctggagtagattccatctgaaaagattactttctttgtttatccataaaaagcaactcttcatccattcaagttttatcatgagattgcagcaattcagtcacatcttcaggctccacatctaattctagttctcttgctattttatttatttttttaattttttgagacagagtctcactctgtcacccaggctggagtgcaatggcgtgatgtctactcactgcaacctccgtctcccgggttcaagccattgttctgcctcagcctcccaagtagctgggactacaggcatgcgctgccacacccagctaatttttgtatttttagtagaggcggggtttcaccatgttggccaggctggtcttgaacccctgacatgaagtgatccgtccaccttggtctcccaaagtgctgggattacaggcatgagccactgcacccagcctcttgctattttaatcatatctgccgttacttcctccattgaagtcgtaaccccctcaaagttatccataagggctggaatcaatatctcccaaactcctgttaatgttgatagcttgacctcctcccatgaacatgaatcacaaatgttcttaatggcatctagaatggtgaatcctctccggaagattttcaatttactttgtccagatctatcagaggaatcactatctatggtagctatagccttacaaaatgtgtttcttaaaaagtaagacttgaaagtagcaatgactccttgatccctgggctgtggaatggatggtgtgtttagcaggcctgaaaacaacataaatcttgtacatcttgtacatctccatcttaggtgaccaggtgtattgtccatgagcaataatattttgaaaggaatattttgctctgagcagtaggtcaaaacaatgggcttaaaatattcagtaaattatgctgcaaacagacgtgctgtcacccagactttgttatttcatttctagagcacaggcagagtagatttagcataattcttaagggccctagaattttcagaatggtaaatggccattggttcaccttaaagttaccagctgcattagcccctaacaagagcattagcctgtcctttgaagtgttgaagccagacattgacttctgtctagctgtgaaagtcctagatggcatcttcttccaatgtaaggctgttttatctacattaaaacgctgttgtgtaacgtagccaccttcatcaatgaccttagctagattttctggataactagctatagcttctctatcagaacttgctgctttaccttgcacatttatgttttgaacacggcttctttccttaaacctcatgaaccaaattctgctagtgtcagactttttttctgcagcttcctcacctctcaatcatcatagagctaaagagagttagggttttgctctggattagactttggcttaagggaatgttgtgactggtttgatcttctaaccaggccactcaaactttctctataataaggctgtttaattttcttataattcatgtattcattggagtagcacttttaattgccttcaagaacttttccattccattctcaatatggctgtttggtacaagaggcttagcttttggcctatctcagtttttgaaatgccttcctcactaaggttaatcatttctagcttttgattttaagtaagagatgacagccaggtgcagtggctcacctggaatcccagtgctttgagagtctgaggagagaggtttgctcgagcccaggagttggaggctgtagtgaggtatgcttgtacaactgcactccagcctgggtgacagaatgagatccagcctccaaaataaataaataaagtgagagacatgtgactcttctttcacttgaacactgagaggctattagggttattaatgggcctaatttcatattgttgtgtctcagagcatagggaggtgagaagaaagcaagagaacacagagacataaaatgagctcagactgttgggaaagtggcaccgatagacttgctggatacagtattaccacaaaacttcaatttgtaaaaaacacagtatctgcaaagtgcaatcaagggaagcagagtaaaatgaggtgtgcctgtccacatacgatggagtattagccttaaaagggtggggaattctgacacctgctacaacatggatgagccttgaagacattatgttaagtgagacaagccagtcagaaaaggaaatcttatatgattccacttacatcaggtacctagagtaatcaaattcatagagaccaaaattagaatggtagttgccagcagctgtcagggagacagggaggaatgagaagttcttatttattgtgtatagagtttcagttttgtaagatgaaagacattttggaattggatgatcatggtagttacacaacaatataaatcctgttaataccgctggatattttaaaatagttaaggtggtgaattttatgttatgtgtgtgtgtatacatattaatagatatatggaggtgggtcctgagctttggtatttttttaagctcccccgttgattttaatgtgcaaccggggttgagagtcattgattggactaatgatctgtcttccatgctagatatgtgcatgcccctgaacaaaactgggttggaaggtggagacagatactctgtagacacccagcatccacatgaaccactctgattgcacacagctttgatgctcagggcgtgtgagtacatcattcaggtggctgcctgcttgatacaaatggctctctctaggctaggcacggtggctcatgactgtaatctcagcactttgggaggccgaggcaggtggatcacctgaggtcaggagttcgagaccagcctgaccaacatggagaaaccccatctctactaaaaatacaaaaaattagccaggtgtgctggcacatgcctgtaatcccagctacttgggaggctgaggcaggagaatcacttgaacctgggaggcggagtttgcagtgagccgagatcgcgccattgcacttgagcctgggcaacaagagtgaaactctgtctcaaaaaagaaaaaaaagaaaagaaaaaagaaaatgaaagaaaagaaaaaaatggctctctctgcataagcaggagagcaattcaaggagagaaataatttgcttatcccgcctcttaggaagtcactccttgtcagatgtggtttggtgcccctgtcaaggctttgctgacgggctccagctagtctcctgggcaggcccaactgaagcatggggaggcattaaacccgcatggctgtgtcatcatcctcaccaaaccagatctggccccaccccagggaaggcgtccctgcctaccaagacacccaagcaagaaacatgggcaacaccccagctcctcccttcccacacctccatcagtcaggtagtcaccaagctgaatccgttctggctcttaaatatgtctcacagctgctcttacaccactgcttggaaattatttccaaatctgattatgctattccatgcatggagaagtttctctatctcttgctggacgtgaatgatgacacagccccatttgtgagcagcagccatttgggaatgtttggggaattggcctttgagagaaatcagtactgtccatgccaaagtatggaaataaaacacaggggccccaatgacatcactgagtgactttaccacccctggggccaccgtacctctgggctcaccattcaaggtaaaacagagttccttattgctgaagccagtttttactgaggtcttacattttttcatggtgaaaggcattctatgtgaagtgataatttatgaaaacagttttttggtgtataatttcatgttctcttagtttgaagaataaaccaattgcatccagctgaaggaaaagacagagagaaagagggaaaggagggaagatagaatgtcttggaaggactggggtagcttgtggagctcaggaagctgtcaaaaaaacaagcctcaggagggaccagaagaggggtggctctgaggagtgtcatcaccttccctttggagtgccaccattcatgtatcccagctcccgacaactcctccctcagatcaaaactctaacatatggaggtgagacttcggctggacccagcactacccttggaccagtgacccttggcagggggacaggtcgcagagcagaaatgcaacctgggagccactcctgtaggatgtgaaggcagtgtcctgagaacagggactggaaagagcccagtaagttcaccacaattgaatatgcccaaaatcaagtggttaccagatgcgttagtcaggactccttgaatgagaataacagacatcaactcaaactagtttaagcttacagggaaatgtattgatgtttataaccatagtataaggaggtcagaggtgcagctggcattgggagagtgggaccccaggccttgaccttcatcagaagcttccctcaccactcttacccaagcttatctctgcatggtggattcatactctcggtctgccatcctccctgagattggagttctgggcttcatttattttttttttttttctatttcgctccttaaaggacttcagggaggagagtttcagggaagatctcacattggctgcacctggataataagtccgtggctgcatcaaatgctatcccaggggtgctgagaactgtgatggaaccagccaggtctggagccaacccgtgcgagcagtggctctgattggcagcaaaggttagggttgggattggcatacaggaggctcagttctctaaaataaagtgcctcctggcatcagaagcagggcagacaaagtcccatgatatgctctctgcatctatagcatggcatttttcctactctttcaaagtctcaaaatgtggacctaatattgtgtttgtggaggaaggagggctagagcaaaccaagaaggctcatcatactatatttatgatgccctgactattcaacttacacaaaacggattttaagccctttgactaatgaaacaaccatcccaaatatattaaaactagccagaatttttgttgttagcgaatgtgtgaaatatgaacaaacagtgaatacttgttccattattttgcacctgacctagctgaaatgctgctttattttattgtccctaaattgtttgatctctggataattacacagatactgttttatttgcttattcatttatttttttttcctcccaacttttgttttagttttggttggagtcagagaatgttgaaaaggtttctcaaatactaaattatctgcagaccatacaaaactgtgttctggctttggactagagcatttttgttgtattttttcatgttgtttaaaaaaacttacttcaaaatgccttacttaacatgggaaaaaaagccgatggcaatataaattacaccctaccaagccttactttctgttacaccctgttggatgagttactgagataaaatgggaatttagttatgtttctgagcatcagtcactatgttagtatgtcactgttttctctttaccctagagagacatatttttacccttttgtaaaaatagggaattatttctagtttcaaaagtaatgaatactcatggtaaaacattcactccctcttggttttaatttttttaaaagacaaaataaatcactattatttaaccaccaaaggagaagttcagatacccattgttgggattaggccttagcatattttccagcaagaactttcatatgtattactaacaacaaacacaggcaaattaatttgtgtaccttctttcccaacgctgttcaaaaagccacagtgggggcgcagtggctcaagcctttgggcacagtggctcacacctgtaatcccagcactttgggaggcaaaggcgggcagatcacctgaggtcaggagttcaagactcagcctggccaacatggtgaaaccccatctctactaaaaatacaaaaattagccaggcatgatggcaggtgcctataatcccagctactcaggaagctgaggcaggagaattgcttgaacctgggaggcggaggttacagtgagccaagatcatgccattgtactccagcctgggtgacagagcgagactctgtctcaaaaaaaaaaaaaaagccacagtgggggcactgttttcatctcttttacaagtggaggatgaatccgctgctggaagggctggaagtctaggatgggagctggacgagccttgagtgcagaccacaggagatggacaaagacagaagttggtcaagcaccagagtgatgcagaggtcagaggcccctgcgtggcagagagccacagtcgaaagggctggagcaggcactgggtccatctgcctcagaccagaagccactcgcatcctttctgccgcagtggagaaaccagttggcctctgacattctgcagcctggcacctcggaggctgcttcagcatggtgtgtggtcagacctggaggagcctacaattaactgacaattagcctgactgggaggggaagtggggacctccctgaggctagtggccaggcagccaaatgggctaagactctggcttcagatgtggtccattgggaagtggctggtttctcaaaagactcagaagtgccaattaaattccagcatgctgagcagggagctcgataaaggcttaaagtctgggtggtactgagaatgcatccacttttcccaaataaataaaaagcagccacatttagggacagcatggatttgagatctgacactactgcgtgttgtatttgtgtttctaggtgagttccagtttcgatttaagactaaggggttgatgaaatcttccataggagccaggctccgtttgcttctttcttttattaggtgcttgccttttggattatatagtgtgttacaggtagtttcattgaagggtgaagtttttccatagcttataattgtatgcctctcttaatgcaaaaagcactgtcttccaaatttgtgaagtcaccttctgtaaaacgaatctgaccttcccatttatttgcatcactttttaattaaaatgatatgaataggtaatatactctattttagctgaaaggccaaggaaggatgtttacatcattgttttaaaaaattgtttcagctgggcacagtggcacacgcctgtaatcccagcactttgggaggccaagcaggtggatcacctgaggtcaggagttcgagaccagcctgaccaacgtggtaaaaccctgtctctactaaaaatgcaaaaattagccaggcatggtagcaggcacctgtagtcccagctactcgggaggatgaggcatgagaatcgcttgaacccaggaggcagaagttgcagtgagctgagatcgcgccactgcactcctgcctgggggatagagcaagactctgtctccaaaaaaaataaaaaaataaaataaaatagaataaaaaattgtttctttggccccttgggaaaatataaatgcaaatttctgccagcaagatcattgttatgatgtttaggaaaatattggcatgtgcttgcactttatttttatttgtaagcctctgagttattgttagtctgttccaatagtggaataaaaagaaagagaaatgaaatgatttactataattccttagctaaccactgaaacctaataaagccttatttctaaatcaaatcataagaaaaatgtcaacctagttcaataaagaattcaccttcttcaaaaggcaaatgaactccttagaaaagaagaatccgaagtatttaatgacagcacagcagctcaaagccatgaagaggcagaaacaaatccaatgtgtcaggggcaaactgtgtgcctcagccaggaagcctcctgtattcttcatgctgtttccaaaaccatttggaaaaattaggaaatatgagtgaatagttatataaatgtacaatagaaaaagccctttctaggcatgatatcaaatgaataatccacaaaagaaaagattagaagagttgactacatacatttttaaagaaatctctgcctataaaaaaattgaaagtcatcttgaaaaccataaatgtaataggtgatagacaaagggtaaatacaatgaatcaatgagcaaaagcccagcattccagtggacaagaacagataatttctaaaagaagaaataaaaatgtccaataaatctaaggaaacaattccacatgtatgtatagagatatgaaggaataaaataaatacaaataaaagtgagataccatttttacattcttgcctgtgagattggttttaaaaaaagaataacagtcaaggttgatgaggggctatgagtaaaggaacattctcattaagggacatttaaatgcaatatgtatcaaaagtagtaaaatgtgtgatgcatacctcttgacccaggaactttttctgagaacttgtcctaaagaataatggaacaaatacatacagacacttaaatgaagttgcagtgttatttaaaatagtacaacattggaaatgatctaacgtacaacagtaaggatttatccaatgaaatgaatggtattatcaagatatgggaagatattcagctatctaatattatgtaatttttattgatgtagcagctttattcctaatctctaaaacctggaaacaacctgatgtccttcaactggtaaaaggataaacaaactatggtacatccattcaatggttactactcagcagtaacaaagactgaactgttgcatgcaacatgttgatggttcccctatgaattattctaaatggaagaagccaactcaaacagctaaatactgtttaatttctgtgacctctgggaaaggcaaaggcatagtgatggagagaccagtggttgctgggaattggggtggtaggagggcttggtccttcctcctacatgaaggagttttggggggaattatgcaactgattgctgtggttttgacctgactctgagcatttgttgaaactcattgaattgtaaacaaaaaagagtaacttttagtgtatataaatttaaaaattaaattgtactcctgcatatgagagaaagggagaggaagagagacagagagagatttcttgtagagaaataaaaaataaactctaaagagactctaaaaattttgttacatagaaatctgttatatcactgagtgaaaaaaagcaaggtgatcctctctgttgcattttatacagtgttctataaaacagcagtcccgggagattctctgatgaggaaaaaagggattcctgaagcagtttgtgccaagtcctctgcccttcctcaattcaattgtatatgaagcttccttgttttaatttataaagaaaagaggcttaattgcctcacagttctgcaggaagcatagtggcttctgcttctggggaggcctcaggaaacttacagtcatagtggaaggggaagggaaagcaggcgcatcttacatggccagagcaggagcaagaaagagagtggggaggtgccacacacttttaaatgaccagatctcgtgagaactcttatcactagaacagcaccaaggggatggtgctaaaccattcatgaaggatccgcccccatgatccagtcacctcccaccaggtcccacctccaatattggggattacaattcaacatgagatttgggcagaaacacagatccaaatcatagcattctgcccttggcccctcccaaatctcatgtccttctcacatttcaaaatataatcatgactgtccaacagtcccccaaagtcttaacttattccagcattaactcacaagttcagagtcccaagtcccatctaagacaaggcaagtcccttccgtctaggagcctgtaaaatcaaaaacaagttagttacttccaagaaacgatgggattgggtaaatacttccattcaaaaagggagaaattgaccaaaagaaaggggccgcagtctggccccatgtgagtccaaaacccatcagggcagccattaaatcttgaagctccaaaataattataaaggttcttaaatattttcaaatcaaagaaactggtttagcattgttaaatgctgtatgttagaggagaaaatagaatctattctaggtatttaagcaaaatggaattttatacagggaatgtggtgcttacaaagtattggaggagcttggggagcacagagatcattgctatactcagtgtccggcaccactaccagatctccgtcttccacctcccacttctcagtgctcaccaatcagatggccagacactaggctgaactcagccactgtagctgccttggttgcctctagaaaactgacagcagtgactagacactggaatccttagtcctgctgttggagctcacgtttctgaggctttgccagatcacagaaacagcaggaggaagatggcttcaacctccatgccaccttctagattctgcaagaaggcatcaaactggtagaacctaatttccaagggagccatttttatctttccaacatcttcagttcaggtgggaggtagaaatggatacctaacagggtgccagttgatcacatccattgcgctttgggatccctttttccggtgtcatctagttacttctcagcttactatgggaaaccatgcttaggataatttcctaggagtgggcttcctaggaaaaatgacaatttaccaacagaaaagacaagaatgtgaatttcctgatgtttgtttattttaatgttaaacacaaatatttctagttcagtagataaaatgacatttaagagattttcattccaaagtctcttcggtcatataggatgagtataccttatctgaaatgcttgaaactaggagtgttttggatttggggttttttcagatttttgaatatttgaaagtaccaactgacatatcttgtggatggaacccaagcctaaacatgaaattcatttatgtttcatatacaccttgtacacataacctaaaggtaattttatgcagtatttttaatcacatatgcaactcatcacatgaggtcaggtgtagaattttttcatgtgatgtcatgtcagtattcaaaaagtgttggattttgggcatttcaaattttgaattttcagatttgggatgctgaacctgtactgcataaatatcagtgtattaacaatcagagaaagctattgcataagcatatggttggttatattcatgtctgttcatcacagtaggttgtgagtcctttgaaggtaagaatcttattctattcgcctttgtatacattctcccccagcacacagttcccagcagaacacctgggaacggtgcgcagtaaatgtcaagtggattgcaatggatattatctgtcatctgtcaataaatctattttttctcccttatttatctgcactttattgagtcagatttgacaagattcatccattagtctgaatattggatttaacatgggagcccaggccagatcatacattatacatttattattttttcagcataattttgtttagcttataaactgtttttttttttttttttttggagacagagtcttgctgtgtcgcccaggctggagtagtggcatgatctcagctcactgcagcctccacctcccaggttccagtgattctcctgcctcagcctcccaagtagctgggactacaggcatccaccaccatgcccggctaattttttgtatttttagtagagacgatgtttcactatgttggccaggctggtctcgaactcctgacctcgtgatccacccgcctcagccttccaaagtgctgggattacaggcgtgagccaccacgtccggccagcttataaactttgacttgtaaaaaatgtaatagagtgtcttggaacagcaaatatcatccaagcatggatgcccactttcgtgtttctaaaactctaagttaactgtggcaagtgtggagttgtgtaagaaacgaccatggagcagtgtgtcagcagcatgaggctttggggctgtttgaggcaccagttcttaggacagagggaagactgcttgcaagagtatctcaagacatgctgttttatgctttgcacacttcatttaataaatggaaggacagcatagccagggaaggagaagaaagttctacagttcctaatggaattgaaaatttcatagaggcctggtacctaggtctttatctggatataggtgtgtaagtagtgcctagagattaagaagagacttttagaggcttacttgtataggacaagaaatgtgcatccccacttttttggttcaaaataagaaaactattttatttatttatttatttatttatttatttatttttgagatggagtctcactctgtcacccaggctggagtgcggtggcgctatctcagttcactacaacctctgcctcctgggtgcaagtgattctcgtgcctcagcctcccgagtagctaggattacaggcatgtaccaccatgcccagctaatttttgtatttttagtagagaaggttggccaggctggtcttgaactcctgacctcaagtgatccacccaccccggcctcccaaagtgctgggattacaggtgtgagccactgtgcctgggtaagaaaaacaatttaaaactttataaatttttattaacctgtggtgtgcatagagaaaagtaaacaaattgtaaatgtgcagctcggttaatttccaataaagtaaacacgcacctcagtaaccatcacccatgttaggaaatacagcattatcagtacctcagaagttctctcataccttctactgtgcatctccccaaaggtacccgctccccaaatctctgacaccatagattagttggatttcatataaatgtaatcacacagtatgctttgttctgtatcgggtttcttttactccctgttctatttgtgaaattcaccatgttgctgtatgtagctctcattcattaatttttgttgttgtttagcatctaactcatgaccatataccacactttatcccttctgctattgatgcatatttggactggttccattttgaggctactataaatgacactaccccaaactttcttttatgtgccttttagagcaaatatgtacattttcctcttgagtatgaacgcagaagtaaaattactgggtcctgaggcatgcatatgttcagctttagtatgttccattgttttccaaagaattttaacaatttcattctcaccaatagtgactaagatttccagttctccacatccttatttgcacttgtgaatatcactcttattttcgccattcttgtgagtacatcttcgtatctcatgtggtttcaatttctcctaataatgacatttagcttcattttgtatgttcattggccatttagataccctcctttgtggggtgacgatttgtcttttacctattttttttattggattgcttaactttcacttactgatttattggtgagttgttgatcagatacatgtattccaaacttctttttcttttccttttttttttttttcttgagacaaggtctcattctgtcatgcaggctcactgcagccttgacctccctgcttcaagcaatcctcccacctcagggtcctgagtagctgggaccgcagtcgtgtgccaccatgcccagctaatttgtattattactcatagagatgaggtctcgctatgtcacctaagctggagcttttcctactctgtagcttgctttttcaccctattggcatcttgtggtgaacagaagttcttcattttaatgtagtccagttcatcaatatttaccttatggttacaacttttgtgtcttgtgtaagatattttttgactactaaaaggtcataaagatattctgttattatatttgtgaggttttattgtttttcttatttagatctataatctacattgaattgatctgtgattcctttttgttctacatgaatacccaatttactcagcaccatttattgaaagggttacccgttatcctttaacagaaacatcaactttgtcataagtcaagtgactttatgcatacagtcgttccctgttatcctcagggtatgcattccaagaccctcaaaggatgtctgaaactgcaggtagtaccaaaccctatatatactatgtttattcctatacatatgcacctctgataaagcttaatttataaattagggacagtaagagattaacaacaacaaccaataataacatagaacaatcataacgatatgctgtcataaaagttatgtgaatgtggtctctctctcagaatagcttattgtactgtattcacctatttttggactacagttgatcatgggtaactgaaaccacagaagacaaaatcatggactgtactcagtactcttcccattagtctatttgtctatcctcatgccagtgccactgtcattatttactgcagttttgttataagtattggtatcagatagtgacagcccctaactttgttcttcaaaattatcttcactattcttgtattctcatataaattttcgaatcggcttttcattttctccaatgctggactttttcttgggattaaattgaatctatagattaatttgagagatctggtatcttttgtaatattgactattccaatatatgggcatggcacatccctctatttaggtctttagtttatcttattaatgttgttttctgtatagaggtcttgcctatcatatattagatgtatctctaagcatttgatctgctaagtgccattctaagtgctttacatatattaactacctcatagggtagttagcagaaaactaaggaggcactattattatcccatttctacagatgagacatagagaagttaagtaacctgaccaaggtcgtgtagctgttaaaaggctgaactgagattttaagttaagcaggctgactacagaatgcatgctttgaattactgttctgtactatgcctccaacatgttcacgaatgcatttaattgcaaacaatgaaaatatgtttaatatccatcaatcagatcttgttaaataaagtcatagagtggaatattatacaggccttaaaatatagttttcccttggtataggtgggagactggttccacaactctccatggttatgaaaatccacagatgttcaattcccttatataaaatatcatagtatttgcatataatcaatgcctatcctcctatacattttaaatcatctctagattatttacagtttctaatatgtaaattctgtgtaaatagttgttatgctttatcatttagggaatcatgacaagaaaaaaagtctgtacatgttcagtgcagatacaaccatccatttttctttcaaatatttttgatccaagattggttgaatccagatgcagaacccatggatatggagggccaactataatatagctctgttattctggaaaggtgcctgtgacatattattaatctttttaaaaaagaaagttacagaacagcttgtacagtgtggtgccagtgttacaaaattgtgagcgtgtatggggtgttagttatggacaaggggctctgaaatgcacttttaatagtgggcctgacttgttattataaaataataaagctatttttatttaatggacagagagtattcttattctcctcctatctaagtatatttctcagtaagtaatagctaatgaaaaataaaagcacaatagctattgaatgactgaacaagtaattttttgagctctattattatttacatgaggatttcctagaagagaggaaagattttagactttactgcaatgaaaaatagctctactttttccactggtacttgcatttattatgatttctttcttcgctccgtgtctttttttcttttttaaaaacagaacaacgcttaatgtaaactttggcaatcaaacaagtacatgggtttcaaagagcttatggcttttttttttttttttgagacagggtttcactctgttgcccaggctggagtgcagtggcacaatcttggctcactgcaacctccttctcccaggttcaagtgattctcctgcctcaggctcctgagtagctgggattacagacatgtgccaccacgcctggctaatttttgtatttttagtagagacagggtttcaccatgttggccaggatggtcttgaactcctgaccttaattgatctgcccacctctgcctcccaaagtgctgggattacaggcgtgagccaccacacctggccttcaaagagcttatgtcttttgtctgttattgtttaggaatcagttttaaaactctcaaactattgatttgcaagatttctcttaatcattgcaaccctacctcccaaatacaattgaaaaagggaaccatgttctcaaaagaattaatatctatccttcccttctctgtggtggctgtttcaaaatgagaaattccaccttaaagagttcagaattgagccgggccaagtagcctgtcaagagaaatagcagattccagcccatcacaaaagggcaaatggattgtttatccatcacagccataaaactgcctgagaactggtctgttaccaaaatatatcctgttggtgaattgatgcacgctgattggatacagcgactgtagaagagcaaagtagctggcttgcagctatgctctgaaaattagctaaaggtctggaacttcatttcaatttcaaaacactgctaaggtctgtgtttacgtatgcctgtgggaatggtccttaaaacatgctcacttgggaaaggaaataaacatgtcatgtatcatatgtttaaattcacacagggtttccagtaagtgctatgatttatttgatttttttaaagccctgacacctgcataaaattaattcatgtgcataggcctgtggcatagttggatttccacaccataatcctgagcactcaccgcatttctgaaagcaaagggtcacccaaccaccacaatcttgtacctcattacatcttggatgtcacttccccattgtaataacattaaatggcttaaccttctgctctcttgaaacatacttaataacaaggatgtcacaatctctgtaagtgagattgtccagcctcatcaaaaagagaacatggccatatttgacttcactggaacaatctgcaaaaaactaacattttaaaaatctccagtaatctctagttcctagtatgtagaagggatataaagtatttccccagggagttttgcttttgcacaggagccaggactcaacagctcaagcaacatttcccaaggtcagtgacaaagggctgggatagatttactttcctctgcatgagagcacccatgtctccaggtctacaaagaatttccagatttttctcttgtgcctatttgcgcttatgtattactatattggaatatcactctaggactttcaaagacgacaaaagcactaatataattcagacgtttttattcttttacacatgttgcaaaaaaaaaaaaaaaaaagaacatgccagaagctctgatgtgtcccctttagcatgaagagctcacattggcctctgtgatttagtgaggtgaatcctctgaccaggaacctcagtgtcacctgggagtttgtcagaaatgcggactctcagacccctcccagacctactgaattagaacctgcattttaacaaacttcccaggagacctgaatgcaatatacagtttgaaaagcactgaaacagtgtagatgcacatcccagcaaatatggtgacaataccaattaaatgtcaacctgcatgggcctgcttaacaattatatagcgtccaacgtaactcttttctgttctcttattgctcagaggcccctctgcccacccagatttgagcaaaatcgcttgaatgtttgacagtgtctttgtgtcttctagcagattgcccttccctaggcttgtcattctcgcaagctgcttagcagttgtcaaagatgatgttataacctgcctggaggcttgtttgatctaatgtcacaatcctattgacctgccaaatcctgtgatccattataattagaacggttcatatttatgtgaattatgggtggggaaattttgtctgtttcatgaagacctctgtttggacttgttagattctgtgaagtcaagacaagcaagtgattatatcctaaatcatgcttcatatgaaataaagtttagaaatatatggtatactcaaatacttttccagttaatattgatattatacaaagtatgcaaattatactatactattatactattatattatcacatcgagaaacataatacctgccttacttaccttttagcaaaccagcaccatttaaagagaacatacaaaggaaagcaaaattaaaattataattgtttttacatgcaatatccatattcagtcatctaacataattttccttataaatatttagtcatataaataaacactgaaataattatctacttgctagggtataatttttaaatggtaaaatcataactcccttccaaatataaaatgaatatgtgtgaaagattttattaaattcattaattaatgaaagtaccagtaagatttaatgaaggaactagtaagtatgtatagacaatctaataaagaaatattacattgagatttctgggttatatacaaaactagttatgtgtcctacagggttattaccatcctacagggcaacaaactgtaacctttgtaggtttcatttccaccaaattgaaattatttgcatttcaaccagataaaaatctaccagctaacctgtcatttcactaagtctgagatcattaatcaatagtaaacaataagttgaacaaagtactttcccttttataatcctggggtggcctttgcccccatatgacatggaaatcaggttttaccttctgtctatgttttgtataatttttcttaacacacttatagaaaaccatcttctgttaaaaatgtcaatttcaactgcaggtttaaatatgctcactttccaagtggacatttattctaaaattacagaaggtgcaaattgacatacttttttctacctcatgtagttactcctgagcctcagtcagttttcagtctttttcaaagtcttctctttccacacctagtgatttttagttctagacttgtaacaatgctgggatatctaaggtggctcagaggacggtcatgacatggaaaagacatgctttcggtgacagagtgcccactcaaagacccattcgtatcaggcgattctactgcttttgctcataccatgtgacaggtaaatcagcctcctgcttttgactgatccctatggacattgatgtgctttcaataggaaattaatatttttgaacttatgcattcactcttctcccctatacatatgctaattacatgtaggtttctctccgtaatcatttatattcatattcatgaataatgttgcctcctccttgtgatttggctgctattgaatctcatctgcattattctcagcaactgatttcattttgagctagcatagaaaagaataaatattctgagtctgttaactaggaaacattgactgatctatgactaaaagttattttctagagtaactgcagtgttttggtttgtttcagtttgttttaatgtcagtgtctgcttgcctacaaagcattcgcagcatctgcaaagaagtgggtcttggcttttactctgctcctggcttcagcttactctgtgaaggcagccaagggcagagaagtcccttcacattctcagcaggggacctggcagaggggaagatgccagaatcatagagttctcagcataaatagtttcaagatctgaatgcattctttcctaacaattgactgaatgggtttgttctctccctttctttctcactagcgctaaccttgtgttgtgttggcctgttcaatagcattcttcagggaagatgtttggagatagaatggaaatttgtcgcagtaaactgcatatgggaatgtgatgtagggtcagaattaataaatgctgggagttttcaggtttagggtctgctgttgagatacccagtgatgttcactaaaaaaaggagtgtttctgtttggctaagaatgaaaacactctattttatgtgtttatataagcatttacttttaaaatttgttctgatgcttagggtagctctattagcattcttttctacacactggagcttgtctgcctctattattgtttcctgtaatgagaatataataaagctcaagcttttacctaaatatcaagttttataactgaaaatgaaaatagattaaaaaatcaaagcgatttagaactttctgcatttgaacgttggaaaatgttagttttgtgtaatgattcctttttttttccaaataatttaaaaggatacatataaaccttggatggcaaactgaattaaaggttgactgtatttcaaacaatgcaatccatagggtaaggctggaaacacatcttgtatgctttttcttttcttttcttttcttttttttttttttgagacagtctcactctgtcacccgggctgaatacagtggcacaatctcagctcattgcaacctccacctcccgggttcaagcaattcccctgcctcagcctcctgagtagctggaactacaggcacgcgccaccacgtctggttaatttttttgtattttttggtagagacagggtttcaccatattggccagactggtcctgaactcgtgacctcgtgatccacccgcctcggcctcccaaagtgctgggattacaggcatgagccaccgcacccagcctgtatgcctttattttaaaagttacttggatcatggaggaatggtatattgcttatcatatagattcttagggatatttctttttttggcatgatgtgaaaattataaacaatcatttctagtttagtctgttttgaaacactttgattttcacattctgatttttttcctccttgatttcattttattataataaaaataacaggtattgactagaaaatttggaagatcctggagtatagagaagataatagtcatctgtaatgtcacaacacagagaataaattactcttaacatttttatttccttctgacattttatccatgcttacaagtatatatttatataaaattaggatcatactttctgtaaagcttgtattctgtttaaaacatctcacttatggttaccttgaaaccatagaaaatgaggttgcagaaatttgtcttttcacatggaaaatgttcctgctatattattaaataaggcagcgtggtttttatctcatttttggtgtaagcagcataatatgcttgatttattgttctagagtctttcttattatgatgtatgttccatactttctgcatttttgcttgtttctgatgtttctgtaatggagcatgtgttactttttggacttaaatggcatgagctgaaataacccaacaagaaccaaacaggaatcatccctgtatgtaaacttcatgagcagccttattatcgtctctggttattttcttagaatcaattcctaggagtggaatcactgggtctaggtgtttgaatatgctgtatattttgtatactttgtagtctagttatacttctctatgggaaggagttttacatttgttctttgcaaagtaaagaatacttattctcaccatttttgctctcatgtctttcccttatcatgccttttgcaccattctctttacctgtcttccatatatttcttatgttccctatcaaccatctgcactctttcctctcttctccctatccctcaaatccacccgttcaggacagttatccctattttttcccctctgttacacagtcatctgccctatagcttgtccttgctgtcctgtagaaccgtgaaccgttttccctctggcctcacatactgtgccaagcactatgcagctccaaagaagtaacctcctaactttgaatatgcaaaaaaataaaaataaaaagaacagatccagttcagagacagatattttgtgagctttcatagtttctgtgaatttaatagcttaaaaaaaaactaacataaaaagttgttttcaaattttcaagtatttactgtctttatttttagaaactgtttggaataattttattataagaaatttagagacttatattagaaagctcattagctagagtccaagtattttccttacaaaaatacctacatgtctttattacaatatcacctttatggctgaaaatctcaccgacagccatattaactaaaattacttttgcctcaaatgctggggctatgaaccaaaatagtctagtctcctgatgcactgaagatgaacagaattcatttataaaaaatatttcaaccagatgtctgagaatttggttacaaatcagcaattacaaaggaagacaaaggaaaggaagacagatttttatttatatattgaaacaatgggtactaagtattatagataattgggataagggaaaggcattccattcttatgcctttggatcctcataatttacctcccacttttgagtgacagcataaaatgtttggttttccattcctgagttacttcacttagaatactagtctccaatctcatccaggttgctgtgagtgccattaattaatttctttttatggctgagtagtattccattgtatatatgccacagtttctttatccactagttgactgatgggcatttgggttggttccacatttttgcaattgtgaattgtgctgctatagacatgagtgtgtaaatatctttttcgtataatgacttcttttcctctgggtggatacccagtagtgggattgctggatcaaatggtagttctacttttagttctttaaggaatctccacactgttttccatagtggttgtactagtttacattcccaccagcagtgtagaagtgtttcctgttcaccgaatccaagccaacatgtattattttttaatttttttattatggccattgttgcatgagtaaggtggtattgcattatggttttgaatgacacaaaggactctggggacttgaggaaaggatgagaggggggcgagagataaaagactacaaattgggtgcagtgtctactgctcaggtgataggtacaccaaaatctcacaaatcatcactagagaattactcaagccgggtttagtggctcatgcctgtaatcccagcactttgggaggccgaggtgggcggatcacctgaggttgggagtttgagaccagccttaccaacatggagaaaccctgtctctactaaaaatacaaaattagctgggcatggtggtgcatgcctgaaatcccagctactcaggaggctgaggcaggagaatcacttgaacccgggaggcagaggttgtggtgagctaagatcacaccattgcactccagcctgagcaacaagagcgaaactccatctcaaacaaacaaacaaagaatttactcatgtaaccaaccaccacctgttccccaataacctatggaaataaaacattaaaaaaggacaaaaaaagagaaatgcattccagtgtcccaattcctgtaactcaatgtctgctacgtgttaggcactaggctaggagctttgtggaataatgcaaagaccctgaccttgctgatcagaccctataatcaacttagaagaaaggcaggcaacacacagcaatagcaaaaggcaatgcaagaaagggcttttggagtcacattcagcaagtgccttcacattcagttcagggagaaagcgagagaaaggttggttccaactgtgttaatacatgaagatattttggaaaggaagtagcttttaaatttagccttagaagcaccaataagatcttgatggaagcgattaaagtgtgctgtacataaaacaaatgcaaaactttgaccctaaaattgtattaggcatatttgggaaaagcaaatagacgtatgtgagtggggcagaaagttcaaatgggaaagtgagagaaaacctggaagataggttaatgaaacccatgtcatagaagactttgtaaacctctatgctagtatttccgagttttctatttagactcacgacatcagaattagactcctgggccacgcttctgatcagaatcatagggcagtaccctgaatctgcattttaaccatcttcctaggagattccaatgcacactaaaatttgagaacgtttcccattcaaataaccatcagggcagtgtggcctagaggtatgaggaagaaaggattcgtccttttggacgtccctctgccagggaagtctcaaagcagcattctttagctctgtgcattcattatacatttaggtaaaatgactgtttttatcttccaggcttcgttagggctcagacttgagtccagtggagctgcctgggaggtgatctgagtggcagaatcttctgtcccccacaagagaggagaggcttgtttgcagtgtgaagctcattgcacctggctctcctcctccactcagaattcttatgcctttaaaaacacacaaacagaatgccctcagagcttcaggggtgagattttatcacaccaacctgtgtagaggacacagtgagggtcctgatcccactcgtgtggaagttgaaaggcagatactgtttggaagaggagagactgaattttatcttactttttaaaaagaggtactatattcacatgacacaaaattcaaaaggtacacagggcatcctgtgaaaagtctccttcctgattgtacccagccatccaagtagcacctctgtgtattcaagttaaagagtatctctgtatctgcccagcttttaaaaatggaaatggtaatatactgtatgcactgttctgcaccttgctttttaaaatttcttgtcagagcttccttgttctttgtgcagtggcatagtattccactgcgtggctatatcatagttcaatttcatgagtcctctataggtggaacttgggttatttccactgtgatgctattacaaacaatactacaacagatagcttgtaaatatgtccttttaaacgtgagcagttatatctctaaggtcaagtcccagaatgagattgttgggctggaggataaataaatgtgtaatttttaaagctattgacaggctcctccccataaatgttataccattttgcattcatatgattaatgaaaaagagtcccagttcacccctacagtttcattaacagaacgttaaacctccgcatctctgtcagcagggacaggcgaggagttgattctctgcacggtttgtgtgggaaggtggagaagggagcaactatactgggaacctcgccaggggtccagagcctgctttgcagacagcagcgggcattcagtggcaacaaaagagagcaccagctttttagtttttctttacgtgtctgaaatatattttgaaattttaatttaaaaattagcagtaaaattgactttgtttggcataaagttccatgaatgttaatacatgtattgatctgagtgacccccgccacgataaagaacagttgcatcatcctcaagcctccctcctcccatcccttcggagtcacaacatcccccccaccctgaaacccctaggcaactgctaatcaattctccatcactatggttttatcttttcaagaatgttatctaaatagaaccatacagtatgtatcccttggagcttgacttcttcagttcagcataatttcctggaggtttcatccaagctgttgcatgcatcagtagtgtgttgctttttactgctgagaagtatcacagtttatttacccattcacccattcaggggcattggggttgtttccagtttgggctgattattaataaaactgctataagcatgcatgtaccattatttgtgggaacataagttttaatttctccctagcataattttcatattataagtaagcttagggatattttcatatatttaaaagacatttgtatttccttttctgttagctgctcatttcttttatccgtttttttttttttttttttttggtggttgttgatttttattttagaaagattggtttaagggagctgacaggacatccagatggaaatgtttagcattcaatcaaaaaatgcaggcctcaattttgagagagaggctcaaagatgtggatttgagaggcacactgatagggaatggagagttgaagccagggagcgatgtaaactcgagagaaacacacaaggctcaaagacagaatctgcaaatgcccatgtttaggatgcagaaagaggaggatgtaaaggaagaaaccaagagacttcttagaggtcacagaagaaccaggctatttcagggtaacattaataaaagctgaattttaaaggtctgataagtaaagggtttaaatcccagagcacaatgtcaagagaaagagagaacatctttctccaagaattccaaataacagtcctgcagttcattctgattgttgtagcaaggtcacatgattacccctgcgctattcactatgaaaggaattcagtgcgttgattggcctacctaggtcatgtgcttcaactccataatttcccagaacctcatggatccccaaggggaaatatggggctgttggaagacttagatgctgaagaaacagccaatgaatgtccagtgagtggcctttgagagtggcgtatcatctgagtgcaggagcttagaagcagctgcacattaagttgagagactggaggcaacatgtgtagaaaacccaaagagtttggctcaattttggtaaccaagaagcctatatgaaggatttttctccccaaaattaaggcaatatcagtgcatattcatacacccaagaaaagaaaccacagggagggaggctgcagagatggtgaagcgtgaggggatggtggaggggaactgaagtgcgtactggtaaagccctggagccaggtgcaggcggtcaggacactcaactcttcctctgaaaggcagtctccccccaaccccggctccgtccactctcactcccccgcatccactctcacttcccccacaccctcattcctcccctgaccaccctcactcctccctccctcactccttgcctaccaccctcactcctcccccatccaccctcactccttgcccatccactctcactcctcccccatcccccctcactcctccccatccccctcactcctcccccacccaccctcactcctccccctccaccttcactcttccccccactcctcccccatccaccctcactcctcccccatccaccctcactcctccccatccaccctcactcctccccattcaccctcactcctccccatccaccctcactccttccccatccaccctcactcctccccatccaccctcactcctccccatccaccctcactccttccccatccaccctcactcctccccatccaccctcactcctccccatccactcttactccttccctatccacccttagtcctcccccatccaccctgacttctccctgcccccatccaccctccccactgcagtcagacaatctttttaaagtgaaaacccagtcatgttgctacccagtgagagctacttcagggcctcaggctgctcccaggacgtagtactcatggcgtgggttggactttagggccctgtgtgaagtggctcctgcctgtgttcactctctctctccagcccccagggaccatcaagatccctcactggcctctttccctctgaaataatggtaactgcctgtctctttaccagaccgtgaggtccaggacaggtggggatggtgtatgtttggttcacgtggatcctctagcactgtgtttggcaaacagtaggcactcatacttgaccactgtatgaaggatggatggatgcccactaatctgtgaaacttgctgttgccttagtgattatttctaagatctaattctcacccattgtttatccaaatcagatgtcattgtattagacactaagcaagaaaaataaataatgaagttattagaaaaagcaagaccaagtcttagaattctattatacatataggaaaaaaagaatatatggaaacatgcaaacttagagaaagtgcttaactctaggtattgaaactaagaatcgattaattatattgtgcaaagagaagactaaggaaagagggaaatgtgggacatcaaggagttaaagatattttaagcagggaaggaaggaggcgatggaataaagcaagccactgttctaaagaatgggattaattaaataaagcatggtacaactgctcaatgaaattgtatgcacgctgtttgaaatcctgtctctgaaggtggggtagtagtgtcaaggctgacgcagaagaactttggtgctaccacatccaaatgtctcctcaaaccaccccaaaggaacatgtcctctacataacactgatgtgcttgctgtgtatatttggctcccccagaagcgagcttcctcctttagccagcctgcagcccaacccccaggtggatgaaaggatggtgacacctcggtgaagacggtgacagtatttgtgatataagtgtcgaaatactagatttatataagtttgaaggacaatgagattacagttattcattaagaaaacaaatacagaatttattccaaaaggtaaaaaaggtgaaagaagatacgtaacatgagtagtatggttgttggaagcattttttcgtattttcacttcaaagttttagaactttacactttctttgaacatgtactgtaaaataaaacaatgcaaaaattgtgttttaaatatcaaattagccatacttgattcaaattatacctgtatacaaggaaacactcattggttcacactgttcttttctctccttcccaaaggatgtgctgggtggcgtcctgatcaccgcactcctcatcgtcctcacctaccctgcctggaccttcatcgactgcctggactcggccagccccctcttccccgtgtgtgtcatagttgtgccattcttcctgtgttacaattaccctgtttctgattactacagcccaacccgggcggacaccaccaccattctggctgccggggctggagtgaccataggattctggatcaaccatttcttccagcttgtatccaagcccgctgaatctctccctgttattcagaacatcccaccactcaccacctacatgttagttttgggtctgaccaaatttgcagtgggaattgtgttgatcctcttggttcgtcagcttgtacaaaatctctcactgcaagtattatactcatggttcaaggtggtcaccaggaacaaggaggccaggcggagactggagattgaagtgccttacaagtttgttacctacacatctgttggcatctgcgctacaacctttgtgccgatgcttcacaggtttctgggattaccctgagtctcaaacagttggaaactagcccactggacatgaaagccaagacataggaaagttattggtaggcaaatcttgacaacttatttttctttaacaacaacaaaaagtcatacggctgtcttgctactaccagataaatgatgctgctgtgtgaaaggaagaactgtctcatagcggtcattggtcgtccgtggtggttggttgtgctacagttgaacccaggctaaagaccataatccggatctttaaaggcacacaccgcgccccccccccccccgcccggcccctgctcctctcgctgttgcacgggctttggatctagtcatgggctggcaggaattgtggcctggcttaggaatagctatgagccccactgggttctggagagccagtagagatggggtgatctgggaggctggaggtagagcctttcttttccgttacaaccttgcctagcatggagttatttctaaaatgggaactttggtctaggagaaggggtggcaccatatgaaacggcattccttggacagggtgacttccttatcgtttatttggtgattttttgttttgttttgtttgagacaggatcttgctctgtttcccaggctgtattacagtggcacaatctcagctcactgcaaactctgcctcccgggctcaagcaatcctcctgcctgagccaactgagtagctgggactgtaagcatagaccaccatgtgcccagctaatttttgtagagacagggtttctccatgttgcccaggtacgtctgaaactcctgggcttaagtgatccacccacctcagcctcccaaagtgctgggattataggcatgagccactgtgcccggcctcctccttgttatgatcaaattagactgtgcctggttgggtggtaagatcactctgaaagaaagctcactgtgaagagatgaaaggtggaggcagagctgtgaggtcatggggaaaagcctgctttccttataagtcctgctgttcatgttggaataaggatctgctcttccttgtttccatgcattttgcaggattccaggtaccattaccacactcttctgacccatgaaaccaactggctgctcacacatcaccaaacaggttgggggttagccttcagcacaggtggatacatctgggattcactgagattcctgccctctcctgcttcctagtggtttgggacaggccctctgcccatcgtcagcagttttttgctttcatacaaacctggaaggcactggcatctgcctaggaaagtggatctgtgaagaacagatgaactcaatcctttctggagtctgacaaagaagggataggcttccttgacattgcctgtcctgacaaggcctccctgacattactcctccaatttcacagttaccttctgtaaatctattttctcatctactgaatagaatcaggcgccctttttgtcttcccacctcttatctcttggcaattttaaggggaattaatgcaagaacaactttagtgtctcttgggaaaacaagccaaccaaatacaaaacccattaagcctactagggtgagtcctcttaacatgggaaggcgatgattatgcaaacaccggagttccctcctcttcagttcctaagaataaagaacaggtatcaagaactttctttaaagttagtgtaactatagttaacaaagtatccattgaagtttagtgcctgtaggactgagccagtgctttatcaacccaacacatcatcaccatgtgcatactctagaaaaaaaaatagcttccttaaaagttacagaggctcttaacgtgttaaaaccgaaaaatcacatttttcttgatttcaaatatgttctacggccttactgttgggatgatatttagtatgtaacttagcattccaatttctcaagaatttttaggccgggtgcggtggctcatgcctgtaatcccagcactttgggaggccgaggtgggcggaccacgaggtcaggagatcgagaccatcctggctaacacggtaccccgtctctactgaaaatac

SEQ ID NO: 742 - DNA, 7452 bp, Homo sapiens
gtggacaccacgtgatcctggggaggcttttgcctcttccgagggctctggctccagggcctccctgttccaggggctaggtgtgccttcctcaatgctgcttttggctatgagggtgacgggcccagggcttcagggccccagatcgcaccttgccatctggggtgtccgtcctttgtcccccacagcaggctgtgtttgcccattttctcctctgccatgggtggagatggatctgaagttgggtgttgaagcctctgaccaaggctgtatcttgttttgaggccctgcccggtttccagggaccacatctggggccaagaggaagaaccgaactgggactaggttagctgtgctgggtcagggcctgggcatgggctgtgaaagctggggactgggaccttcaggccctctattgagatctttgcagaagggggtggatttaggaagctactgggctgggccagggcgtggaaggcactgaagccgtagtgtgtcccagcattagagtcccagagtttagcttggcggggcaggggcaggtggtggggagaacaggaaataggccaggctctcggcggagtctggcagctttgagccttctctgggcttctggggttttccccaggctcctgagccagccaggacatttcttaatcccactgtcagccttccaagaagccccgcccactgggctcagtcaaggcaggagcgactgtgtgtcacccctttccctagaatccagccccactgccaggaaaagggagctcagggcatggaggtgaggctgggactctcccacatctgcttgttcctcatacccacctccttagctggcccctggaagatgacctcgaatgccagcccaagtgagctgggcaccagccaggggaggccaggtctggcagctcattaccatgggagggagggcacgttctctccgacgcccgtcttcgtgtctcctccctccctcgccttcctccttcctagctcctctcctccagggccagactgagcccaggttgatttcaggcggacaccaatagactccacagcagctccaggagcccagacaccggcggccagaagcaaggctaggagctgctgcagccatgtcggccctcagcctcctcattctgggcctgctcacggcagtgccacctgccagctgtcagcaaggtagctcaggaggagagggctgggcacgggagacccaggggtggacaggtggtgttctggctcccctccccagggccttgatacttacagtttggagggggagcagggactgcgctagctgaaagaatgtcccaaggcagagacctctgaaccaagtctctgcctgtcacttgttttcaacgagtgaaaactggcagcagttggttctaggatctcagggaggaacaggatttgaggcccaagccccaagagcaggcattgcccaagggatggctgggtcctgagtacaggggacccgggggtacaagtagggtgagagtggggcccaagccacccctcaaagacttgggctttgtctcggcctcttgggcttggatagagaacagtgcccagtgtgactcccccaaatatctgacctcttcgtcctgctctgcctgaatggatgtgtgaccttgagcaaatcactgccccttcctgagactcagttttctcacctataaaatgagaacaataaaccccaccctgcccacctcccagggctgctgccaggtcagaggtgaagaagggctttgcacctggtgaagtaactaacccaaggtctggctttcattctacactgtcaggctgcatctgcagccaaagtctggggactctgcaggtgggacttggtccagaggggactggcaaagatgctttcagagctcccctcccacccccaccccgagctcttatgtgtgtctgcttcaactctgtctcccaggtcttggaagccctctggggaactgcagaccagagaggttgagtcacagagcacggcaagaaaggacagggttcagaccacctttctcctgccccagacactgccccttgctgtatgtgcatgggaggaggagcagggactgtggtccctggggtgactggagagaattggctgcagggtctaggaggaaacagggaggggcctccaagggttgagccctaactccccatgcttgagcaaccactgacctgagggagcagtctgaacccctagggaaacaatgactcccaaatactgctttttggcaggtgtggaactgagggtaatcacactgtgtgtcttctgcttcccctggagataagtgaggtctgacctcactacaggccagagagttcctagcctccttcctccttcccaatatttgccaggctcggagaagaggtcaggcctccactgcagcaggagagcttttggtagactcaaaggaggacatttgagcaggagtgagccagaggaaggttttctcatgtccagcttgggtccctcaaaatatagggatgcaggtatattctggcctggaggcaggacccctctgaagccccctgctgacctgtgttttgtcctgggacttctccccgctgagggtcttttctctacaaggctgagctcctgcaggctcatggagtgcagtgatgctggggaagaggaaagtcctttggggaagcagaggcctgaaggcagggacttcaggaaaatcttgagggactgtgttggtgtcaagggtcaaaaagcagagaagggacctggtgcagtagctcatgcctgtaatcccagcactttgggaggccaaggccagaggctcgcctgagcccaggagtttgagaccagcctgggcaacgtagtaagaccctgtctctattaaaaaataaaaaaagtagagaagggtgcaggttggggcctcaacctaatctctggccctagtccctgggcacccagctgggggaatcaaaaggagctcaggttttgaggcttctttcctggtccccaagacccagagtagagttcacccctccattctgcccttctaaagatgtcctggtccactcctctctctgggtaccccaggcaccccagatctccccagctgagcagccctgagagtctcccactctcatacccttcctaccatcagagaaacgtcttgctacagaacaggatcttctagatcccagaccagtcttgtcagctgtgggtcctcctcagccttctgggagccactcccagctgcaaggcctaggccggctgtccagggggctgccctttggtccctggggctgcatgtgacccacctgcgggagggaaagaggctctgggctgcctagatacagcactgaggctcttccctccttggcttctcactccttccaactcccttctctctgagcctctgttgttcctccagctccctccttttcctaagctcggtggagcttaagatgcataagtgggtcagatgggctgtatcccacccctgcctccccacaatgtctccttgctcctggcagctggctgagggccttcagcataggtggggtccttgaagagtgaggcccctcgctctcctgcacatgcagccccactgtggccccgtctgctacagcccctctccctttgttaggcctggggaaccttcagccctggatgcagggccttatcgcggtggccgtgttcctggtcctcgttgcaatcgcctttgcagtcaaccacttctggtgccaggaggagccgtgagtgctgcccaagggtccctgagcaggcagggtgggcccaggaccactgctcttgctctagtagcagtgagaagggcctcagaaaccctgtgtccaatcctccccctgaggctcaagggaagggaaactgaggctcaaggtcatggggtgggttggtgacagtcgggatgagggaatgagagcctaggcttgctggctcccagacctgggcactgtgggccccacagctctggtgcccactccctgtgagttttggggaaacggcttcgcttcttggagtcttggtgtttccgcagagccaggatagcggcccagcctgtgatgggggctgtaaggacctctagaaggtgcggtccctcctttgggtgggtcagctgtggtacagagagggcatgggacagacacacctcctgccctcacaggctcagactggagtgagctgtcagaagttcaagagttgctgctgagggagagcgcagaggacactgcagggcctgacctggtccggggtggccagagaaggcttccccattgcacatttatcccgaaacctgactaacgaggaggagtcactaccaggatagagtggcgtgggaagagcgctgcagttgagggaagggtacacccaggtcctgagttaggggcacggcaccagggctgctggggacagacacacacaggtgaagggcaggtgggctgaaatccagctcactctgcactcaccaggtcaggaccctcaggcaaggctgcctctgttcccaggggcatttcttcccagatctcacaaaggtggcctggtggcttgagtgctagccccatgcagggttgctgaggaaaccccagtggctcagtgggtggagacagggatggagacacctgagatgaggctggtgaggtgggcaggcccaggccaaccaggctcttgcacaccaatgacctgagctttggactttacctaagtgagcaggaatccagtgacaagttttttttttttttctttttttttggagatggagttttgctcttgttgcccaggctggagtgcaatggctctatctcggctcactgcaacttctgcctcccgggttcaagcggttctcctgccccagcctcccgagtagctgggattacaggtgcctgacaccacgcctggctaatttttgtatttttagtagagacaggtttcactctgttggccaggctggtctccaactcccaacctcgtgatccgcctgcctcagcctctcaaagtgctgggattacaggtgtgagccaccatgccctgcctccagtggcaagtttttaagccagtttcgggatgagacacggccttagcagaatgactctggctgcctcgtggcagatgcacggcagcggtggaagagtctccagtctgcaggcctggagagtggtgagggggtgggcatgaggtcaggagggggtctggactgtagcggtggcagagaggatgaagtgaagagacgagtctgagcgctgtctaggaggtgggcaccctgggagttggtcgtcacagacagcagcggactcgaggggaggaaggcaggaatggcatctaagtttctcatggcggatcactcaccgaggcccagaacacaggaggatgagcagacataggggcaactgctaagtttaattggagacatattaagtctggggtgcctgtgggatgtctaaggaaatgagcaggtgttcgggtccctgtaaccctcatgagagcagcttctgggaggcttcagggagagcccacactgcagggggtttaaacttgagtaagagacgagaaggttgttgttgaatgcccttcagatagactttctccacctgccccagctctgcctgaagggccaccaaccacatctgtgcccactgcccaaggcacgagctggggaaatttggggcagacactgcatcctgcagggcctgctgtggaggctgaactgagggcgtctgggacagagagaggctttggactcaggataaatcttttgcaaatatttggccccccactatggagtggggagaaagtgagagaccccatgggtggggccagtagccgcggctgacatgccctgttgcacacagctctgggaagggcagttgctagccttcgggcttgtgagaaccaggacccagaatagggtctgcttggacgaggggggccccactgaggagccccactgatgaatcccatccccagggagcctgcacacatgatcctgaccgtcggaaacaaggcagatggagtcctggtgggaacagatggaaggtactcttcgatggcggccagtttcaggtgaggtgcagggcagggctgcccggtctgtgctcccagggcctaaggagaatctcaagacaggtgctgctggggggaggtggctggggaggacggagactcatgtgggcaaaagctagtgaggcaatgggggctttgtgaggattgcagggctctgtggggaaaatgcagcccctgtgtggggcgagggctgcagaaggggacggagacttggtagggtagggttcagcgtaggggaggggactcatagggcagtgggtacaatggggacaaagggttcaatggaggaaggaacaaatgagtgagggactcagtgaggggaaggctcagtagaggatgcagctcagtgggggatgggttcactggggtatggactcagtgggggatgggttcactggggtgtggactcagtggggtatggactcagtggggtatggactcagtgggggatggagctcagtgggggatggagctcagtgggggatggattcagtgggggatgggttcagtgggggatgggttcagtgggggatggactcagcctcagtggggcatgggctcagtgggggatggactcagcagggtatggactcagtgggggatgggtttaatgggggaattggttcagtggggatggactcagttggggatggagctcagtgggggatgggtttagtggagcatggtgtcagtgggggatgggctcggtgggggatgggctcagtaggacccagtggtgcagcagtccacaggaggagggagataggtgtcagggaggggatgctgagaggcctccagtctcggatgcataagcccagatgtggtcaggacaatccccttctgggagtcaagtgtttattctggaagctattactgtcacaagtgcaggaaggggcagggagaaggggatagaatgggaggagcgatgacccatcaggcccatgccttcttctttcaggtccagtgagcatgagaatgcctatgagaatgtgcccgaggaggaaggcaaggtccgcagcaccccgatgtaaccttctctgtggctccaaccccaagactcccaggcacatgggatggatgtccagtgctaccacccaagccccctccttctttgtgtggaatctgcaatagtgggctgactccctccagccccatgccggccctacccgcccttgaagtatagccagccaaggttggagctcagaccgtgtctaggttggggctcggctgtggccctggggtctcctgctcagctcagaagagccttctggagaggacagtcagctgagcacctcccatcctgctcacacgtccttccccataactatggaaatggccctaatttctgtgaaataaagactttttgtatttctggggctgaggctcagcaacagcccctcaggcttcca

SEQ ID NO: 743 - DNA, 30752 bp, Homo sapiens
tgtaggggaggatattttgattgaacacaggcttgacagaatcttcttttcttcttagaaatcctagaaaacagaaagcaacaggaagatgtcttattgggaactacccccatcaacttcaccatgagtcaaacaaggaagaaaacttcctcagaaggagaaactaagccccagacttcaactgtcaacaaatttctcaggggctccaatgctgaaagcagaaaagaggacaatgaccttaaaacaagtgattcccaacccagcgactggatacagaagacagccacctcagagactggtaagctgctggctgctggtgtttttgctgttgtatttgttttgtttttacttccacatttaaaatatttttatttttaatttttgtgggtacatagtaggtgtatatatttatggggtatatgagatgtttcaatacaggcatgcaatgcctaataatcatattgtggagaatggggtatccatcccctcaagcatttatcctttgtgttacaaacaatcccattatacctttagttttatttatttatttatttattttgagacagagtttcactcttgtcacccaggctggagtgcaatggcgtgatctcagctcatagtaacctctgcctcccgggttcaagcgattctcctgcctcagcctcccgagtagctgggattacagatgcgcaccaccatgcccagctaatttttgtgtttttagtagagatggggtttcactgcattggccagggtggtctcgaattcctgacctcaggtgattttcctgccttggcctcccaaactgctgggattacaggtgtaagccatcacaccaggcctcttttagttatttttaaatgtgcaataaattattgcacatttaaaaataactaaaagagcacaacgggttgtttgtaaacaaaggataaatatagtcaccctgttgtgctatcaaacagtagatcttatatattctattttttctgtacccattaaccatccacacctcccccaccaacaacacacacacccttcccagcctctatgtttctttattttttagagttttcttctaaagtgatcttatgggttaaactaaagactttaagacttttgagactaaagactcaactatgagtctctgtgctaatcatttattatgttacttacatgctttaaatgattcataattttacttttaaattgttaaaagcaatataacactacagaaaaatgtagggaaaatactgaatttcctttcattataacacaaacgatcatttctttaagattcttttcagtcttttcttttcatatgcatgcatttatgttctgtcagtcagcagtcaataaatctttattgagtgcttgctatgtagtaacccctgctctaagtgttagaaatacagccatgaaaaggaccaaatgcagatataacttcaggtggtgataagtgatatgaagaaaaataatgcaggctaaggagacaaagaatgatgggatggggtgctatttagatgggggtggaggaaagaagtcttcgatttggaggcatttgagcagcaatctgaataaaatcagctttgctgaatgaatgaataaagcgagccacttaggtatttgtgcaaatagctttccaggcaaagagactgtacatgcaaaggctttagatacgactgagcctagagtgcttgagagagagtcaggaagtcagggatgctaaagcaggatgggagacatggagaggaaggggtagtggaagacaagtcagagaggtcgctggggccagattggcatcttttccacagttgtaatagcttacagattcctcctgagtttatgtggagctgtgatcctacttctagaacatattattatattgctcaattcccacattgctacatgatgctcatatgcataattttcatggttgcataatattccatcacattcatatgtcttaattactcagtgagttccttgtttgtccttcggtgagtatctttggctttctttctttcccattccctgtttcaccatatttcagctatttttaaagtataaatttccagaacagggattgcaaattcaagggttatgaaaataaatattgtcaaatctctctctaaagttatgtgttatgtgcaatgtcatcaatatattatctattagattaaaagcattttaaaaacattttaagcatatgcaaaaatagaataaagaatccccatagtcacctacttttagtaattatcagttgggcatggtgtttcatgcctgtaatcccagcactttggcaagctgaggcaggaggatcgcttaaggccagtagtttaagaccagcctgggcaatatagcaagactctgtcttggtcgggtgcggtggctcatgcctgtaatcccaacactttgggaggccgaggcaggcatatcatgaggtcaggagatcgagaccatcctggctaatacggtaaaacccagtctctattaaaaatataaaaaagtagccgggtgtggtagcaggtgcctgtaatcccagctactcgggaggctgaggcaggagaatcgcttgaatccgggaggtggaggtttcagtgagccaagattgcaccactgcgccactgcactccagtctgggcgacagagcaagactctgtctcaaaaaaaaaaaaaaaaaaaaagactccatctctagaaaatagtttaaaaattagctgggcatggtggtgcatgcctgtggtcctagctactctggaggctgaggtgggaggatcgcttgaattttagaggttgaagctgtggtaagccatgattgcaccactggactccaggctgagtgacagagcaagaccctcaaaaaaaaaaaaacaaacaaacaaacaaaaaaaacccatggccaattttctttctgagacagaaaaaaaaaaaatcaacccatggccgattttgtttctttctttctttttgagacagagtttcgcaccgtcacccagtctggagtgcagcagtgtgatctcggctcactgcaacctctgcctcccaggttcaagtgattctcttgtctcagcctcccaagtagctggaactacaggtgtccgccaccatgcccagctaatttttttgtatttttagtagagaaggaatttcaccttgtgggccaggctgatctcgaagtcctgaccttaggtgatctgcctgccttggcctcccaaagtactgggattacaggcctggccaggagccactgtgcctagccaattttatatcatttatacctaccctcccttccatcagattgtttgccatcaaatgccaaaaataatacagttttagcagcaagtagattaaatgtattttaagtatgtttttataaataggaaattaaagtctgtctttaaaagaaaaccatctctatcagaaaattgttcatttttgttctagagtgtgatttagagcatcaggaaagaagataatgaataaatgtaattgtgattaaattaacagtgcaaaaccaagccggggtcatccctgctgtgcaacactgaccacccaagctgcttggttcttcatttctatttctcccaaaattctatggctcctggagtcatgttaattctgtccttaaatagctctcccacctggttcttcctctccattgctgctgcctagctctcattgtctcttgcctggaccacagcaatagcttcctaactggtttctctgcttccagtcttgctctcttgccaatctgtcctctacactgccataatgctctttctaaaccacagatatggtggtgtctctcgcctgcttaaaatccttcactgagtttctctcacctatattcccaagcatggccctcaaggtattagtgatcagttggatattggatatctcttcatgacctttgccttctcccacctcccaccacagcgccgccctcatcctctacgtgtggccctctgatttacttataattccctggactggccacattcttctcccatccccagcaagtggttctttgtggctagaaagatgttccctcgtgtcaccatcctcccctgcaaccccccgacttatccctccctcatgtccacccacctggatgactcccactcttcctttaaggtgcaatccaggcaccagtttctcttggaaacttcccaagaccctcctccccgacctggaatcaccagacttgaggtacttattgtcactgaagtgtggaaccacacacccctgcgtgcctccacttctcatctatacggtaacggtggctttcttgctgtctctttcattaaacaggcagctctttgaaaacaggaacttgttatgttggttcctggtacagtaccacccatgttaccaatgtgtaataatgttttatgagtgtcgagagttttggttgacaaaccttgacagatttcagtcggaaaggaacttagtgagagcactaagaaccgagagctttgttcagagctaacacagctaggaaaaggcctcaatctccacagagcggctcctgtgtggttactaatgcgccccccatgggtgcctcccaccccactccagcctagctgtagcagccctgactcacttgttctacacactgagctgtgacataaggtatcctgtgaagagaaggcttcatataatttttcttttttttttttttgagatagagccttactctgtcgcccaggctggactacagtggcgcaatctcggctcactgcaactccacctcccgggttcaagagattcttgtgcctcagccccctactagctgggactacaggcacccgccactacactgggctaatttggtttcataggtttttttttttttgagatggagtcttgctctgttgcccaggctggagtgcagtgggacaatctcggctcacgcaacctctgccttctgggttcaagcaattctcctgcctcagcctcccaagtagctgggattacaggtgcatgccagtacgcctggcaaatttttgtatttttaatagagacggtgttttgccatgttggccagcctggttttgaactcctgacctcaggtgatccacctgcctcagccttcctaagtgctgggatcacaggcatgagccactgcacctggccggtttcacagattttttaaaaattgaaatacatgatctgtgaggagatgtccaggggtctcataagttagtactcacatttatatttaagtgttttgataaagatttatcatgatgatttattttggtaattgaggaactgtaaaaccaatattcattcattcaattgtttgctcatttaacaaatatttaccaaatacctctcaggtaaaaggccctgcagattaccatgtgcataggaggttccagtaagtttaaatcacgatgctcttgagaaatgaaccaggcatttcatagatgagtaaaccaaggctcagagaggttgagtgacttgttcctcagacagacctgtgatttggatcaggtcttttgactgtactgcttacttgtcagtcacatcaaacatgacagagcacccagtgggatgtggactgagaagagatttctgcgtctgtcagtttgtaggttattgttggtgacctttgagaaacaatgtatttggatagaggagtgtagcaaccagaaggtagagggttagcttgtaaatgtggggaaggagttgggccagcaagtggaaaccactctttccaaacatttgacagtaaaggaaatgcttgacagagcagtgtcttgaggagaaaacagaagagtgggtttggtggggctggaacttgaggatgattgtaggtcgagataaaaagcttaaaaacaaaagagagacagcaataagatgcaatgcagagaaattttttaaaatacaaaaataacacacacacacacacacacacacacactaggctttggaacaaactattctgggttcaaattcaggctctgcttcttcctaattaatcgtgtctctaagtttccaaatctatgaaatggtttgtgactcgtttagacaaaatgtcctgtacttgctggcacctaagaggcagtccctccctgtctcccatccacaattctgctctgccccacccaaaattagggttgccagagaaaatacatgcaacagttgaggcatacaataaaagaattccttgtcgatttaaaatttaaatttaactgggcaccctgttgttgtttttcctaaatctggcaactctacccaaaattaaatgccttgtgtccaatgtgccataaaaacggaaggcgagagtgaaaggttaaatggtggatgctgctgcctcctactggtgaaatgtggtaacaccaagcatcccaacaaggacgcgtatcctacgtgtggttttcttagaccaaacaggaagccacaagactgctgtggattacaggtgtagtttttattatcctgctaatcatttggtctaaatttattactactgcaaacctactatcttttaattttcacaggtaccaatgtatttcttcttagctatgttgtcttacacctttttgtcagggttaataaaatattactgctcattccagaacttattatttcctattggatttcaatatacataatctatatgtttaaaattgtatatttcacttacaaaatcactttaaaatcactgtcagtacatgtatattcatttttccttagaaaagtatgatgtgttttatgtatgtcttaaatgctggcacctggcctgccatggtgactcatgcctgtaatcccagcactttgggaggccgggtaggtggatcacctgaggtcaggagttcgagaccagcctggccaacatggcgaacccctcatctctactaaaaatacaaaaattagccgggcgtggtggcaggcgcttgtagtcccagctactcgggaggctgaggcaggagaattgcttgaacctgggaggtggaggttgcagtgagctgagactgtgccactgcactctaacctgggtgacagagtgagactccatcccccccaacaaaaaaaaaaagaaagaaaaaagaaatgctggcacctgcaagtaggcaaagaacgagtacataacaggtgctcaataaaatgatagcttttattattatagtgctatcttttttatttatttatttattttttttagatgcagtttctctctgttgccaggctggtgtgaagtggcacaatctcagcttactgcaatctctgcctcctgggttcaagatattcccctgcctcagcctcctgagtagctgggactacaggtgtgcaccaccacgcccggctaattttttgtattttagtagagacagcatttcaccatgttggccaggatggtgttgatctcctgacctcatgatccacccgcctcagccttccaaagtactaggattacaggtgtgaggcaccgtgcccagccactagcatgttattacagtgttattacagaggaagctagtgagggtgccacagtagtccctaataacaaggaggacagacgaggctttccaaattcactttctggcaggagttgagaaaaagcaaaagctctcccaggcctagtttctctggatttgtgtttgccaattgaatggtctagaaactgaccggcaagaattccacttactccgtgtggccatttgcagctccttgatggtgatttcaacgctttcccttcttcacctgtttggtttgaggaggcaagtatctctgcttcctccctagcagttgcatccaccaaagatatgcgtgcccttcaagtaagcaagcatctcaaaagccgggctgacaggtttacttctcacccaggaatgcagctctgtcttcatgctgagaagcccaggtcaggtcatgatagaaaagccactgcgttcctcaggctcctgaagcagtgtctgggcacctggcggcaggaacagtggttagttaagctttgtccctagtaaatggctctgcctctgagttgaggtttttataaaagagcaattcagagttatgcagtcttttcacttgtctgattgtggtcattatgcatctttaatacatccatcattaacagcaaattcttttttatgcttatcacacagctaagcctctcagttcagaaatggaatggagatccagtatggagaaaaatgagcatttcctgcagaagctgggcaaaaaggctgtcaacaagtgtctagatttgaataactgtggattaacaacagcggacatgaaagaaatgggtctgtatgcagcagactttgcatagaggaagatagggcctttccattgagataagcagataaaacatactcagctacccacctagtaaccccaagtctgctgagtggtcccagacaattgcagaaacagcatcgctttttttttttttttgagacggagtctcgctctgtcacccaggctggagtgcagtgacgcatctcagctcactgtaagctccgcctcccgggttcacgccattctcctgcctcagcctcccgagtaggttttttcttttttcttttttcttttttttttaagaaaaaggccaggcgcagtggctcacgcctgtaatcccagcactttgggaggccgaggcgggtgaatcacggggttaggagttgaagacgagcctggccaagatggtgaaaccccgtctctactaaaaatacaaaagttagccaggcgtggtggcgggtgcctgtaatcccagccactcgggaggctgaggcagagaattacttgaacctgggaggcggaggttgcagtgagccaagatcgtgccactgcactccagcctggcgacagatcgagactccgtctgaaaaaaaaaaaaaaaaaaggaaaagaaaaacaagttaattgatccttcctcaagttttgaagacttcagctgagtttaggaaaagaggctgtatgaaatcttacagacacactcctgcattttcagactgcagttatttggcagaaatagaaaacatcccaagaaatagcaaatgtaaacatcacaatttctccacttgtacagctgagggctccctgctttgcccaaagtcagcgtgcctaccactgtctattctcttacagtgtaaaactatatcctgtgtatgtaagcattgcattttatttactacaaatcacaagtcacatacacatatctgtattttcttctgttcacttctagttgccttgctgccttttctcccagacttggaagaactggatatctcctggaatggttttgtaggtggaaccctcctttccatcactcagcaaatgcatctggtcagcaagttaaaaatcttgaggctgggtagctgcagactcaccactgacgatgttcaagcactgggtatgatgaatgcatttcttaaaagatggattcggccgggcgccgtggctcacagctgtaatcctaacactttgggaggctgaggctggcggattgcctgagctcaggagttcgagaacagcctgggcaacatggtgaaaccctgtctctactaaaatacaaaaagttagccgggtgtggtggtgggctcctgtagtcccagctactcaggaagctgaggcaggaggatcgcttgaacctgggaggcggaagttgcagtgagccgagatcgtgccactgcacaccagcctaggtgacagagtgagactccatctccaaacaaaaaaaaagaaaagaaaagaaaaaaaagaacaaggctgaccaggtccctgctttcatggagtttatttatttatttatttttatttttatttttttgagatggaggctcactctgttgcccaggctggagtgcagtggtgcagtctcggctcactgcaacctctgcctcccaggttcaagcaattctcctgcctcagccttccaagtagctgggattacaggtgtgaaccatcacacctggttaatttttgtatttttagtagagatgggggtttcaccatgttggccaggctggtctcgaacgtctgacctcagggaatccactcaccttggcctcccaaagtgttgagattataggtgtgagccaccgtgtccagcctcatgtagtttcaatggaggttactgtaaaacatgcttacactgggtctgttacttcatgtgtaaaatagaggagttagagtagacaagaattaagttcttttacaattccaaaagaatacttctctcttctattttcccacccacattttgaaacattaaacaaaacaagatttttaagttaatagtttaactagaactagaacctccattaagttagtttcataggattaaatttgtacacagtcattctacttatccaactgctgtactaaaatgcttgctggtttattagatgtctttgatactttttattcttcttttgatgtaaagtttcttattttcatgacttattttaatcctttacagctatttaaagatttctgtaaaaacaacacattttatgccaaatatctccgcttgtcagtctctccctggaaatgggggcagctgacgtcccccggcccatgcctcctgtagctgaggagaaacattacacatctcaggttggccagatcctacttcaaatcctagtgcctacccgcccccccggcctttttttttttgagacggtgtttcattcttgtcacccaggctggagtgcagtggtgcaatcttggctcactgaaacctctgcctcccaggttcaagtgattctcctgcctcagcctcccaagtagctgggattacaggagtgcaccaccatgcccggctaattttttgtatttttttgtattttaggcgtgcaccaccatgcctggctaatttttgtaattattttgtattttttttatttttagtagatcctacttcaaatcctagtgcccatcccccaccccccccctttttttttttgagatggcgtttcattcttgtcacccaggctggagtgcagtggtgcaatcttggctcactgaaacctccgcctcctgagttcaagtgattctcctgcctcagcctcccaagtagctgggattacaggcatgtaccaccatgcctggctaatttttttgtatttttagtagagatagggtttcaccatgctggccaggctggttttgaactcctgacttcaagtgatctgcccgccttggcctcccaaagtgctaggattacaggcgtgagccaccatgcccagcctctagtgccacttttaactagctttgtgaacatgaacaaataatttaaatttctgagcctcggttttcttatatctgaaatagggataacctccctctcaaaaaattgttgcaaggattaaacaatttctgtaaagtgcctactgcatgcctggtgcataatagttgctcaataactgatagtccttctttctccattctgtcatctaaaaccacctttctgtgggtttacatgatgagtttagccccacattaagcagctggttatcatgtagcagactcacaattttaacataccattactcaggtgtgaaaagacaactttcttattttctgtgattaacctgatctttttcctgaccctccatccttagaaaacaagaaaatgaaatttctgccctgggacctgttccaaacttacctggttgaggagggagtctgcactgttgttgttctgatgtttgcgcccttttccctctcccagagttatttcttctctggaaggacttctgcatcctctcccatcaggaggggcttacctatcacccatactctatcttcttcactcaaccttaatgcagatggggtatagggaaaataaatggtttcttgataagagaacataaatcagaaggcatttcaaaattgttacacccattataatagtttagtaccgagtggcaaatgcatggcactccagtaccatgaccactgcagacataactaatcaatcatgagctctttctccctgagcctggggaacacctcagggctatagaaagtcacccccaattgactggtaatagcacaaaaaatgatgcctgttcattgctggcttaagatgctataactcctggggaatacgcattttagcatggggttcctggacttctaaaaccttaatccatggaatgaataaaccatggtagaagttcaaacccagggacaggtagtaaagagggttctagatacaggggacttgccagaatgcttaattgtttgcacattgagaaagtacattttccatgtatgtgtctacccgcaaggcagtgaaaatcattcctaaggacagatctgtttggtcacttctcctattctctcccagcctccactctgcagccctgggagctttccagtgtgtaatggtttcagaaatgttagttttcatccctgtgtcactgcaccctcctttaccccttaaggcagcacggctgttataagcttctagtgcctgatgctctattattagtttctctctgtagtggtcagttcaggttgcatgtgatattcctcatatatatatatatgtatatgtatatgtgtgtgtatgtatatatgtgtatatatatacttgtgtgtgtgtgtgtgtgtgtgtgtatatatatatatatatatatatatataggcatgtgatattcttgacattggagagagctttacctctgtggtggccagttatctgctttgcctcacttctatccctggtcaaacttctcagaaatgctgatcccagagagaggggctaagggaaagcagatgaaccaccacaaaagcagcttcctaaaaccaccctaccaataggtggatttttctacaacaacaattgtttagctcatacgcatggcttcagaattttggagggattagaatgactgtgcctgtaaatctagagaagcacgccctgctatgaaggaattgggttctttccttctctctgttcctcggtgccaaacaggacagtacctggcccagtttccacactccattaatcatggttgtgctgattctgaaatgaattccctgcttttctgactagtgaccaacagaattttcgggccatttgttaacaggagaagcatttgagatgattcctgaacttgaagagctaaatttgtcttggaacagtaaagtgggaggaaatttgcctctgatccttcagaagttccaaaaagggagcaagatacaaatgattgagcttgtggattgctccctcacgtcagaagatgggacatttctgggtaagtggaatttgaagagaaaaaaaaaaagtgaagatgcccactggatagcttgggaagtttgctgtgttttgtcttattctgaatttaaagaagggtatgtaggaggggagtggagttttacgtcacgatatccccaggtgatgtaaaactccactcccctcctacctacccttcttatttggatttctttccttctaggtcaactgctacctatgctgcaaagtctcgaagtacttgatctttccattaacagagacattgttggcagtctgaacagtattgctcagggattaaaaagcacctcaaatctgaaagtactgaagttacattcatgtggattatcacaaaagagtgtcaaaatattgggtgagttaacaatggctggatttaagattacatgtataattatatatgatatacatataaatatatatattgaaaagttactaggaaatatagcaaaatataaacagtggttgtgctggggaataagattatgggtaattgaaatctcctttaggctgggcacagtggcttacatctgcaatcccagcactttgggaggctgaggcaggcggatcacttgagatcaggagtttgagaccagcctggccaacatggtgaaaccccatctctactaaaaatacaaaaattagttgggcgtggtggtacgtgcgcctgtaatcccagctacttgggaggctgaggcaggagaaattgcttgaactcaggaggtgaggttgcagcgagccgatgtgggtgacagaagagactccatctcaaaaatatatacatattttatattttatttattttctaaatattttatagagaacatacactttcatgattataaaaataagcctttagtatgactgactctgaaaaggccagtatattttaggttaagataaacactgggaaaaataaagtttctttgctgctagaactactaggttttctcttttgaaagtgtcagcattattttatgctcagtagtaggaaggaataggtactgataaaaagaacggcttcgatggcgtccacagttaaaacttactcctctgtatatagtatccatattaacagagaataggaaatgatattgtgtttccccttcaacttacagaacctgtaatattcactggcagcttgaataagtctaaaaatctatgtaaactccaatgctcaagtgtaataggagaggatgctcaagtgtagttgcaggattcatgtcaaaacccttggcaatgtatgcagatcttaggaagcgtgtgtgtgaaatcatggtcgggttcacagaaggccagatggtaggaagtctacacttattcctccttttgtcttttgtgaacacagtgtgttccctcaacctcccttactgcaccatggccccacccctgttccacaccttcttaccaccttgcgatatgtcagaatggtagcagagatggggtttcaccatcttggccaggctggtcttgaactcctgaccctgtgatccaccctctcagcctcccaaagtcctaggattacagatgggagtcatcacgcccagcccggtttttctttttttaagagatggatctcactatgctgcccaagctggactcgaactccggggctcaagcaatcctcctgccttggtctccctagcagctgggactataggtacaccactgtgtccagctaccagaatgggattctgactttctttgtagatgctgcttttaggtatttgggtgagctgaggaaattagatctttcctgcaataaggatctaggtggaggttttgaagactcgccggctcagttggtcatgctaaagcatctacaagtcctagatcttcaccagtgctcactaacagcagatgacgtgatgtcactgagtaagtatatattgcagagcaaaggaaagacttttggaatcttggcctatatttggaaacttggaaattttaatatgtacacttaaatttacttcttttgaagttattggaaagatcaattcataacagttctgtgagtgccccaatgtagtacttggcatgtattaaacgcccagtaaatgttagtgaatctcagttccacccatacatgtctgcaaatgatagatttggcacttagggaaaattttgaatttatgttgctgtttagaaataaatctcttagtgtcacaaagttgattacaaacaggttacatacctgtaaccaaacgtcaacacaaagggtatcgaggctttctgaataacaagtgaagtgaagccactcagatacaaatgaagttacagaaaaagagtcagcagggtggcgcgtgatggctgtacgttactgctttgggcaactacacttattttcctactgcaaacatagttctgtaattacaacatgtaatatataaatgcaatttcccataacagagcaagcgtagccttgagattaagggttttatcccacctgtggccacaataagccttcaatgtacatccagcatctgaccatggctcaccatctagacctccactaccctggtccaggccacggttatctcatgcttagattattgcaagagcccaaatggtctccctgtcctctaacactctgacttcattcactccccctcctcctcacagactccaccctggccactgcccttgctgattctcagacacgccaggcatgctctggccttgggccctttgcccatgctctctctccccaggtcatgggcaattccaggctagaggtgtctcgtttggcatctccccactgctcaagcacaggcacctgcacatggttggcaccaagtaaatgcatgttgaatatgtgaatgaatgaatgaatgagtgtacaatgagaataaaagtaagtttctggttgtttatagtacaatttggggaggaagaccgtaaaatatgtttctaggtctaatacatctatctttttaaacctgctaaattatctttcagactcttatctctcaatttgggaaaatgggaagaattcaagactttcatgaagattttaaaatgacaaaataatccctttttgagctttgcgtggagcattatgggttcctaccatcccctttacttatcatagcctgagcgtcatacctaggaagacattcagagttattagcccaccagattcccttggtacaactaaataacatgaataccacatctcattttgctcctcagtgctggagaacctcaattgttcccactagtataacggaggactaagctttccttacctaggttcacagccactgacatgggtgaatggccctggaaaactaataattatttgataactgtaatgaattgcattgctttccttctgcttaattctgaaaagatggaaatgaaaatacatcctgctttgtactttacgctgttaaataattgaacattcttttatccgatcattgtaaattgctccaaagaaatggaattatagatcctttaagcaataactactgatgaatcctctaatggtgtggggcaccgtgccaggggctacagaaaatcccaactctcagggagcttcggtatggcaagggcaggagtaaaccgatgcatacccaaactacatggtgaaatacaaagtgctgagggggttggaagagggagaaatagttacacctgttgactttacaagtgcccatctatctgccttccctgcctttcccctttctttcccctgacctctctcccttctcccacaaacatttgtacctctgatgtttcaggtactgattcccattctgggagtgagatagttcctataacgcagagcttgcctttagtgagggaagacagaaaacaaatatatcaacaagaaaatatcacataatgctgggtgctgtgaaaataaaatatggtgatgtgatagtgaccaaggggttactttggtgtgggtgaccctggaaggcttcaaggaggtaagccagctttgtagagatccagcatactgcattttctgccttggtaatagttggggcaaaggccagagaagtagccaaaagatagcgaacgagggtaattcctagctgggcccctcaggacccagtgccgttaccaataggtgtctgttctgatggcttgttttcattgccttactggtacttacattctgagaaaagaattataatttcaaacattaattgagcagttagtatgtgccaggcactataccaagcactttacctttaccaagtcattttaccttcccaatgaccacttgaaatagagaaggctaagagtttttttttttttttttttttttttttttgagacggagtctcactctgtcgcccgggctggagtgcagtggcgcaatctcggctcactgcaagctccgcctcccgggttcacgccattctcctgtctcagcctcccgagtagctggaactacaggcgcccgccactgcgcccggctaatttttttttttttttttttagtagagacggagtttcaccgtgttagccaggatggtctcgatctcctgacctcgtgatccacccgcctcagcctcccaaagtgctgggattacaggcagtgagccactgtgccctgccgagagggctaagagtattagagttgagaaggctaaggttcagagacgttaattaacttgtccaaaatcacacagttctttagtagcagatccaagatctacttctctgtctccacagcctttgctcttctagcctgaaaaggggcttggaagtaagaaagcccaagcagcatgctgggaagaggctggtttggggtgtataaaggagggagggccggggtggggagagctgtattgactgacagattaaacagattgtgggaaccaaacacccagaagactccctgtgagatggtgcctaaaacatgtcactgttgatatttttaacagcccaggtcattcctttactttcaaatcttcaagaattggatttatcagccaacaaaaagatgggcagttcttctgaaaacttactcagcaggctccgatttttaccagcattgaagtcattagttatcaacaactgtgctttggagagtgagacttttacagctcttggtaagagatttcccagatccctgcaggaaccatgcaataatgtgcgagggagacttctttttccctgcatttcattccaaggctcagccagtttgcgaagtactaatttgtcttcttttcaggacatatgccttcttaaaagtgaccttctgaaagtccataaaaatgattctagtatgtgcagggttttttttgttgttgttgtttgtattttgagacagattgtcacccagactggagtgcagtggcgcgaccttggctcactgcaacctccgcttcccaggtttaagtgattctcctgcctcagcctcctgagtagctgggatcacaggtgcacgtcaccatacctgactaatttttgtatttttagtagagacagggtttcaccgtgttgtccagcctggtctcaaactcctgacttcaagtgatccaccctcctggtggatcatgcccacctgcaggacatggtgaggatctgggatctgatgggaaagtgagccatttactagagtgtgagcctagctaactgccaagcaatcactcccaacaggatttatgtgctgtctgaggaatctgggtatgccttaaggtcacagatataccccagcctacatcaggaacctactgaatctgaaagttctgcccatttggtgacaagtttagtgtcagcaagtaaagggaggtggtgttggggaccccagcactgtgtgcacaaactactgtttccctgggtgatggatttggaaaagtgctaccaagtctctttgtttcaaaatatctcctcttacttgctgacactgcacttgtcaccaagtgggcagaacttaacaactgacatttattgagcatatcctatgtgccaggcccctttccaagaactttacatgcattcaccaatttaactcttataactgtataaggcatgtgccattgttccattttatattttgcagacaaggaaactgaagcacagagatgttaagtacatgaggtaacccaaggtcataagagccagaggcaggatttgatttcaggaagtctaattccagatgttttgcatacagaaaatgtaccatactcttccccacagaataactgtaatcagttttagggagctcacaggcaccccttcaagcatacctagacttgtctggtgggtccatgggccctagaacagcagggctgaaggctacgtatcctgggacttttccccatccagacatgtggacaatgggatgaatgatgctgagggagtgctgggagcaggacatggtgaggaccaagtctatgcgagctgagcaaaatactcgagctgagcaaaatactcaggctgagccaaatactcaggccgaaaaggagggcaagaatgccctaaatatagagttcttcaaatttgggggtaaataatatgcatttatttttattaatgtataataataattactcatttttatgaatttaatgcatttatttcattaataatagcccttgtctggtggacagtacaattcatttttaaggaagtgccaactgataaaaaacactggtgagagggttggagagaaggactctgtttttagcattatccaggaagcacccaaatccagcaactccaatcacgtgtatgggggcaaaaaagagttaacgtagcaggcctgatgctgctatccctgtaaaggcctgctatcaaccagtaaggctggcccttagctaatatcccagaacttggaatctgggggtgttcataccatttcctaactgagaagggtggtttactgtgcctaacctgtttgcacagacaacatggtttatgctgaacatgagcttttcttttgtgaggatggaattttggtgtatgctgagcggagggtagctagatgactaacccccagtagagaaccgtggacttgggtcaggcacagtggctcacacctgtaatcccagtactttgggagggtcttgctctgctgcccaggctggagtgcagtggcactatcatggctcactgtagccttgaactcctgggatcaagtgattatgccatctcagcctcctcagtagcttctgggtctataggaacatgccaccacacctggccaatttttgtatttttggtagagatagagttttaccatgttgcccattctgggaaaatattttttttttaaaggaattgcagccattagaaggcacagctgtttctaattctagctgcacaatcaatgaatcatgatcaactaggtatcacactaaattatatcatctgacataaatctaccattcaatttgaattaagtaaatgaagcaaatatatatttccctacatcacttttagaagaaaaagttccatttctccttaatgtagatctctgtaaggattttcttactagatattataaaaggatatatattttccccttgaacacattattttctagaaggaaggcagaatagattaaagtgcaattaacttgggaataagatattctggttaattttaacattgggggcaactgagaattaagcagaaaatcttttacttttctttaaaaatctttccaaaatacattagttactttccttgcctgcagtaattgcgtgaagtaaatacaaataagttttggtatttcagactctgagggaggcttgcccccatctgaatctcagcagtgactgtgcagtgaaatatgtaccaaccaggacacattctggaaatcttgactagctgtccaagcactttgcctctttctccttcctacatgtgaagtgaaggaaagaaaccccagttggacagtgaattccaatttatcaagttttgcattgctaaagtttccaatatttccccaaataaaaacagacaacaggctgggcgcggtggttcacgcctgtaatcccagtacttcgggaggccaaggctggcggatcctgagtcaggagatcgagaccatcctgggcaacatggtgaaacagcgtctctattaaaatacaaaaataattagctgggtgtggtggcacgcacatgtagccccagctgctcgagaggctgaggcaggggaatcacttgaacccgggaggcggaggttgcagtgagccaagatcgcgccactgcactccagcctggtgacagagcaaggctctgtctcaaaacaaaaaacaaaaaacagacaacataaattgaggccataaatttaaggcagaagaaaatggtctctacaactttctcaaccccagttatattcatgtgttgtcctagaccagtttcctcaaatccaaagcctatgatctgtaagaaatcctaaattactgctgttcgtattgttatcacttttagctgaagcctctgttcacctctctgctctggaagtattcaacctttcttggaacaagtgtgttggtggcaacttgaagctgcttctggaaacactaaagctttccatgtctcttcaagtgctgaggctgagcagctgttccctggtgacagaggatgtggctctcctgggtgtgtatctacttgttcccaagcggtcttggcaaacagagcagtgggtgcggcccctgcaaagcaccaggtggggaggtgggggaggtaccagacctggggtgaagccctctgtgcagattcccttctcaccaacatctgccgagaggtctaattaaaatgagcgaaggcaattctaaaaccacatgacagtggaaggcatttcctaaaaggatatggatatagataggtggggaggttcctgaaaggcaaacagctctgttccacacctccgcggtccgtgagtgttcccacttcagtcatctacatctcacccatccacatggttccagcactattgcttaacttttcctttaaattgactctttaatttaaatgcttttatttaaacaggaaactgattatcactgtaactgaaatacaggtatcacttctcacagatactagactgctgatggctttgattagaggctcctctctattagaaaaagatgagagggttaaaggcatactgtagtaacaatctgaccctttttccatgtcagtctagaaagatggaaagataattgaataaggaataacttttgcactgtgggattgaggctacccaaatattccctaaaatcattttatgtgtctgggcacggtggctcacgcctataatcccaacgctttgggaggccgaggctggcggatcacttgaggtcaggagttcaagaccagcctgaccaacatgaagaaaccccatctctactaaaaatacaaaattagcaggacatggtggcacatgcctgtaatcccagctactcgggaggctgaggcaggagaatcacttgaacctgggcggccgaggttgcagtgagctgagatcgtgccactgcactccagcctgggcagcaggggcgaaactccttctcaaaaaacaaaacaaaacaaaataaaaaactcattctatgtttccactttcccattataaaacaatgaatcagagagtactctctctggctcccatctagccttgtccccacactccaatcactattcagccggaattccaaagcaatgagcgcgcctcccaatgaagggccagaacagtcactccaggtagttgtatctgtgttctcagtgtatatattagtcagttttgctatgacacggcacatgggcctaaaaatcatgtgttatgcaagaattattcagtaataaccacaggacttacggttggaagcaccgcactcaaacacttcatcagtggcatattttaaaaaacagaagctatgaaaaatagcaatacagttttacatattaaatagttaagaaatgagcaaatattacattttcccgagaaagacctgaagtttgtagaagtggcctgtccacacttccattggtggaaagagggtgtgtggagagatgagggttgttgtcctcatgaggtgtgtgcatgtctgcattttctttctttttttttttagacagagtttcactctgtcacccaggctggaatgaagtagcatgatcttggctcactgcaacctccgcctgccatgttcaacagattctcctgcctcagcctcctgagtagctgggattagaggcatgccaccacgcctggctaatttttgtatttttggtagagacggggtttcgccctgttggccaggctggtctcaaacacctgacctcaggtgatccacccgcctaggcttcccaaaatgctgggattacaggcgtgagccaccgtgcccaggctgtttatttctatatgcagctcaattcagctggggacagttttatatgttcacctagtgtttcctgtggacaaattgtgtgcataatgcaaacaagaaatttgcattatactcagattgtttcctgacatttcaatctcattgaaataaacttgtgttttcaaaacaagtgttatagcaaaaatgattgtaattagaagatggggacaaaacattgtgattttaattcgcatttccctaatgaccaatgatgtcaaacatctttttatgtgtgtattttcatttcttagctcctttggtgaaatgtctgttctaaatcttttgcctgatttaaaaaattggattgtttgttttcttattgatgagtttggagagttttttagatttttctgaatacaagtaagtcctttatcagaaatataatttgctattattttctctgggtctgtcccactggctttttcattctcttgatagtgtttttttgcagatcaaagctttcagttttgataaagatttatcaatttgttaatttgatgaatagagtttttttgtgttgcatcttagagcgttttgcaaatctaagttctcaaagattttttccatatttttgtcttaaagctttgtatttgcattttatattttgacctattacctattttgagttaatttttatataaggtatgaggtatgggtagaggttaatatttttgcatattactgtccaattatttgagtgccattaactgaaaagactatccattctccattgatttgcctttatatttttgtgaaaaatcaattggccatatttgtgatggcctacttctggtctctcagttctgttctattgatctctgtgtctcttattttaccaatatcacgctgtcttgattgctgaaactttatagtaagtcttgaaatgaagtagtataagtattctttgtttctttttcaaaattgttttggttattctagttacttagcatttccatttaaagctagcatcagattgtcaatatctattttaaaaatccatctggaaattttattgggattacattgaatttatagatcaattcagggagaaatgacatcttaacaatattgagtattccaatccatgaacacagtctatctctgtatttaagtactctttgatttctttcactggtgttttctagtttttatattttgttaaatttatatctgagtgtttaatttttgttctcttataaaagatactgtttaattttagattcccaatgttacgtggatatataattgatttttgtatattgacattttactgcaaacttgctaaactcatctgttagctgtaggatatttttggtagatcctgtaggattttctatatagataatcatatcatctatgattagagacaggttttgttttgttttttttttttttttttgagatggagtctcattctgtcaccaggctggagtgcagtggcatgatctcggctcaccacaacttccgactcctgggttcaagcgattctcctgcctcagcctgctgagtagctgggactacaggcatgtgccaccactcccagctagtttttgtgtttttaatacagacggggtttcaccatgttggtcaggatagtctcgatctcctgacctcgtgatctgcctgcctcagcctcccaaagtgctgggattacaggcgtgagccactgtgcccggcctagagacagatttatttctttatctctgtgtatcttttctttctttttcttggttatttagctggctagatttccaatagatgttgaatgagatgagagcattcttgccttgcttccagtcttagtcccctaagctaaggggaaaagcattccatttttcaccattaagtatgatgttagctataggtttttttgtagctaccctttatcaggttaaggaatcctaatttgctaagagttcttataacgaattttgtcaaattatatttttctgcatctattgagatgagcatttaaaaaaactatagttcattaatattcataataataatgaatgataataattaataatattagctgattttttaatgttaaatcagcctggtcatggtcattatgtattatcttgtttatatagcgttggatgttatttgctaatattctgttgaggatatttgtgcctatgttcacaaggggataatagtctactggttttcttataatgtctttgtctggctttgttatgagggtataggtagcctcatacaatgagttggaaagtgttccttcctcttttattttccagaaagattgtgtaaaattggtattatttattgctcaactgtttcacagaattcaccactgaagccatctaaacttggaattttctttgtgggatattttaaattacgaattcaatttaaaaaatagagatagaaaaaaaatagagctaggactattccagttgtctatttcttcttaagcaagttctgatagtgtcttttaagaaattggcccatttcatctaggttgttgaatttatggaaataaagttgtttccttgttatccttttactgcccatagtgataccacctgtctcattcctgatattgataatttgtgtttctatctctttattcttggctagtctgaccaaaggtattagttttctgttgctgtgtaacatgttaatttgtggattaaaacaatatccatgtatttgttcacagttctttttaaaagcttatataaatgtgaggggcaccagtgcagttttgttccatgcgtatattgtagtggtgaagtctggggtgctgatgtaaccatcacccaaatgaataatgcatcattaagtaatttctcatccctcacccggctcacagttctgtaggtaagaagtctgacacagcttgtgtcggttctctgtgtagggtattacaacactaaaatcaaggtgtcagcctggctgagttctcatctgaaggctctaggaataaatccactttcaagctcattcttgttgacagagtcgaggaccttgcagctttaggactgagggtcccgttttcttgctagctctcagctgggggctgctgtcagctactagaggccagccacattccttgatacatggcccctcattttcaagacaggagtggattgtccgtgcctctcacactttaaatctctctgacttctgtgacttccttcctcttctgccagcagtaggaggaaattctctctgcttttaaagggctcatgtgattaggttgactccatatggataatctccctttcttaaagtcaggtgtgccatatagcctaagctaattctgggagcaaaatctaccacattcagtcctggggatacaatggaaatcttaaggtggctatttagaattctgactactgcaaggggtttattgatgttgtgtcttctaaaaaataagcttttgatttttatttatttatttctctgaattagacaccattaaatatatttaagttattttatttaatgtttataattaaaatttgcttcttcatttcggtcttttttatttttgtctgcatcaaattttattcaccatgtcttcagccattgtatattttttcttaatttttactgacagtttttttctcaggtcaaatttatacttttacattttatcagggtatattttccttctttgaatttttactcaataacaagtattacaggccaggcatggtggctcacgcctgtaatcccagcactttgagaggacaaggcaggtggatcacctgaggtcaggagttcgagaccagcctggccaacatggtgaaaccctgtctctactaaaagtacacaaattagctgggcatggtggcaggtgcctgtaatcccagctactcgagaggctgaggcaggaggatcacttgaacccgggagatggaggttgcagtgagctgagattgcgccattgcactccagcctgggcaagagagcagactccatctcaaaaaaacaaaaacaacaacagcaacaaaaaacaagtattactatatgtggttttagcaattgtcacttttatattttttctaatagaaacattaaaaatttgttaatcactagcttatatacattttaaaaataattaatggcatttattttttcatacagtaaactataaagagtatacccatggcctacatttcccctacctagattttttaaaatgtaataaatctaaaataataaaatataataaaatagggtgctcacattataaaatccaaacaaaaaataaatttatttatttatgtattttattttatttttttctgagagggagtcttgctgtgtcacccaggctagagtgcagtggcacgatcttggttcactgcaacctccacctcctgggttcaagcaattctcctacctcagcctcccgagtagctgggattacaggtgcccgccaccatgcccagctcatttttgtatttttagtagagacggggtttcactatcttggccaggctggtctcgaactcctgacctggtgatccactcacctcagcctcccaaagtgctggtattacaggtgtgagccaccacacccagcctaaaatgtgtttttaaaaaacaaaaaagtagaagaaaggggactagatgaggcaagattgatgtaatgaagataatgttgaagttgaatgatgggtacatggtggtccactttctcctattctctctactttttgtgtttgaaaattttcataatacaacattttttaaaagagaaaaagcgtgcacattgttttaacagttaggtcttgagaatattatgattaatgttgcgagacaggaagggagacacacactgacatgaacacctagagacagagtgcagctgttgtgtgcacgggtggctgagctctcaaattcactgtggaatcaaactgttggcaagtgaaagtgatggagttggagcatcctccttgatctgaaagccatgcgtgtgaggaaagactgaaagaccagggcatgttcagtcctacagggataaagtttaagggagacctggctgttgtccaacactgcagggctgccaggaggaagaaggagctgaatgttacagctgactgattggggcactgggtgaaagacaccagaagatagattggggccctgtgggagggcttcctcccgctaggagctgctccataatgctggggcaaacttgaaagaacagttcagccagaattgtggtggtcatgagtagagaggctgtgaaaaggatttctctctgattattgattaggaggttggataaggagacttccaagatcccttgcaacgctgagattctatacaacccacctgatctctgcaatccattcctgggtttggttgaaaagggaagcatgtcccattttccgtggttatctctcctgcctcctcttacagaagtctttatttcatcattaacttatttattttctgatcaaatagctcagattgtacattagtcatcatttttaagtgccattgtaggtagtactgatatgttctattcaaaaggaaaactgtcacatgtattggggtctctaaggtgaattggaaattatccaggtatgttctgcatatggaaaatgctcatttaaataattgctggatgaagaagtactgaatgaatgaaaatgaacaattaaagcagcaagatgattatttacaaatggtccttagttaaagccaatgagccatcactctttacatttaattagagaaaatctgtaggaagagctcggacttcagtggaacagagagcaggaacttgacaaaaaaaaattattgggttgagatttggaaaaagaaataaaaaaagctgtagatgggatgtacagagaggaaatctgttactaatttcagatgtcctgaataaagctgctaataacaaatcattactaattactaatcttgtcattactattcctggagatagtgttatgggaaatgggaatagccatggcagacagtattcttgtatgttagcatttagagtgattctgttttccagcatcggtcatacagacgggtcatctggccaaactgcaaaagctggacctgagctacaatgacagcatctgtgatgcggggtggaccatgttctgccaaaacgtgcggttcctcaaagagctaatcgagctggatattagccttcgaccatcaaattttcgagattgtggacaatggtttagacacttgttatatgctgtgaccaagcttcctcagatcactgagataggaatgaaaagatggattctcccagcttcacaggaggaagaactagaatgctttgaccaagataaaaaaagaagcattcactttgaccatggtgggtttcagtaaactgatttcccatgtcctactaagctacaaaccattctccaaaggaaaagaacatgaacgaattccagagtcatgaactgaatttcaacttctgggccatttaatgggacttatattacaagagctttgtaaatatatatatatattacatatatatatgtaatatacatatatacacatatatataatatacatatataatacacatatatatgtaaatatatatataatatctaatatgagcatgccattattctctgtctatgaaacaaaaatggcatttttcaatggatttgttttggatatataattagttcatttgctgtttagaagccttgccaaaagtgtttagattttggtactgcaactgctttcctcttgcccagaaatgttttgcctcttcttttcctacaagttaaatgttctaaatataaaggggtatgtgtgtgtgtgtgtaattctaatgtgaaaggcactagctgtctaatagtttcatgtatcattactattactatatgtatcttaatgtagtctatgtaggtttttatcagaaagtgtacctttctatggtttattattttatattctggtgccttttatctcagatataaaccatgaacagtaatgatagtcactgacatataaatcttagtaaaaagtgattaaaaatctaaaactcagtatgaaaaacatatcttgttagaataaattaaaaccttttattgtttaaaaaattgttaacatattgcctccaggcatttctttgaaatggaatttgcttcataaaactaatttaattcgtt

SEQ ID NO: 744 - DNA, 63531 bp, Homo sapiens
cttgaagaagacagtattttcctgtgagctagaggatcttcctgttattctccatgcagttcaaattctgtcaattattatccagttagtcatcgctccagaggtggactgtcattaaaaaaaaatagaaggtgtgtgtttgtgggtgagtatgtgcatgtgttgtgtatgcagggggtggggaggggcgagagcggtcaaataggaagtgccttggtatttatgttgaagtgcacactggtttaaattacccactgggaatatgattatgcttaatctatgctcagttgaaaggggctggggctgctttctcccctcccttcttgactctctgttcacagaactcaggctgcctccagccagcctttgcccgctagactcactggccctgagcacttgaaggtgcagcaagtcactgagaatgagcactttcttctcggacacagcatggatctgcctggctgtccccacagtactatgtgggacagtattttgcaaatacaagaagagctcagggcagctgtggagctggatggtctgcctggcaggcctctgtgcagtctgcctgctcatcctgtcccctttttggggcttgatcctcttctcggtgtcatgcttcctcatgtatacttacttatctggccaagaattgttacctgtggatcagaaggcagtcctggtgacaggtaagcagacggtgctacaattttcactgagggtatgatctgaaacttgctttgccttagcaggactttgtcaaatctggcttaaaaataaaatacttggcatggagtaaatgaaagccctcacccaagtatttttcatgacactgttttcgttccgttttttccaggaggtgcatttgaaggggctggtagtgggagggaaggagaggatgaagtgcacccagacaatgattttgttaaaatttcccaggaataaatattaataggcaaaatggcaatatttcatgtgttctattgtacccaggaatgtcccatagattgttttttaggcttaaatggacttttgttctgacatcattgtttggccaggttctccacctggactcttcttccctaggtatgcaagaacgcttacaagccaagttctacttgtcccttgctgttttgaaatattgaagggattcacttacctgggctggagactttgcagtttgcttggctgctgtcaagaaccttgtgtcctgtctgaactgttcctcattagacctctaatgtttcttaattggaccaacttggcatcgtgtccaacattcagttgcctgttagctgagctgccagtttttcccttgtttgtgtgtgtgtgtgtgtgtgtgtgtgtgtgtgtgtgtgtgtgtttccccattgcaagtgtgaggccaaattaaatttctttgagttgtaaaatttttgcttggttatggagtttaagcttggatagggctgtaattaggattatccagcgttatcctaacccagaaagccctaccaaataaaaaaaaaatcagctgtggaatcatttgggggagatcatcacccctctgaccatgatcctcagggtgaaggcaagaatggcatggggatgtggttgggagaaaatctggggcttgacaatttgcagagaaacagactttgtttttgggttaaagtaaaatgctttcttgaaacaaaatgcaaattggtgcttgttggggttagacaagccacagaaaagaagcttctttaaattaatttttgaaagtttagagggagaaaattcagtcaatgggatgtttatctgcaagaatgtctgatatcacctggaatcatgtatctgggagtctggctggattttccacttttttattagaattctcaaatggcttatcggtgaaatttgtaagagagtctcaattttcctgttctgtgtcctgttctgttatgaaaccttaggatgagctcaggcaaaccacagggtagctgagaaaatgggaatcccttcttgcttgtttattttgtcaacattctttatcctctgcatttcaagatgcaggtgttaattaatgctcacaaaatatgcacccaactcagtgagcccacatcagccactgaaaggtgccgtgcatttagtgttgagtgaggatgattgaatcaattaggcaactcaagctcaaggactaatccctgcatgaaatgcttatggcaatgaagaaagcttagaattaagatgagcactacatatatttaaggatgactgaaatgtcactttcacgttctttgttattttcaagttctctgtcatttttatgaggaatgctatgtgctcatatcatcctagacaaggcctcaagacctttgtatgaaatcgagaaatttaaaatgaattcattttgttagaccacaactctttaaagaatgaagaagccacgctgagtttggaataacctttgttccagattggcttatgataacatagattagcacgcattgtggtggggcaggaccaaagaaaaatgtggcagtgtacatcaaaaccatacatatggttcctttatctgataattcaagtcttggaaatttattttgaagacataatctgaaatatgaaaaaaagagtagaagcaaaaccaaaatggcacattcaacacaatcttattatttaatttagattaatattaaatatcaaaagcaacaaaaagggtgataatatatggtacatcctctgggtataacaatgtgcaaccattaaaaatgacagccacaaggactgtgttacatggaaaactgcttgggccaaaggaaaacacacaggaaatcccagggttggaacaagtctacagccacgtcaaatgcatagattcctgggctgggcaaaaagctgtgataacagctggaagaaatagtttgtatatggttggattagtgtgctggaaatagtttgtaaatgaaaggaaatagtttataaaggaaatagttggttaatggttggattagactatttacgtgttattttctctcctggatttcaaatttctctggtgtgattacattactcatacaataaaaatacttaaaagagaacacaaaacagctaaagctccttttagtttgtatttaattttggacccaggtgagaggcaattacaaagacaaatttaaaaaaatgacttttttctcccctttgagccctttatttcattttgctaagatgttcaaaagtctgttgcctcagagacaatataattacagtaagaaaaagtaagcaagcatagagtgtttgaatacatatttgtcttcaagatacctgaaaccacagaggccattcaaatatttaaaatgtatgtgtgatgcattttattttattttatttcattttattttttgagatggggtctcaatctgttgcccaggctggagtgcagtggcatgatctcagctcactgcaacctctgcctcccgggttcaagtgattctcctgcctcagcctctcaagtagctgggattacaggcacgtgctaccacgttgggctaatttttgtatttttagtagagacagggttgtatgatgcattttaaatgtataactgtaaaatgaacaaagagcagaccaacacgattgtaataacatctcaaccacaacatagtgggaaaaaactttgaagacacacaggcttgggtttgaatcctgcatctaccttgccttaggctaggtccccagaggcagtgctttctgtgaggatttgtgggaaagatttattaggagggtttccagagaagatgggcagggaaaaggaagaagccaggtaagggtgagacattgagaagtcctctgaagatcacttgggcttgatcaccctgggcggacgtggggtggtgtggatcactcatcagagctgtgccaattggagactagagagctgtagtctttatgccttcacaccagtcaatcattagttaagggcagtcacccctgttcccccttggttgtgggcaggaggggagacttaattccatgcacttctggcaccatgtggacactggctggcaaagtgggttctggtcctttggggaaagaatcgcaggtgctggctgctgggagtcaaagtgcaccatggattgatgcacacaacagtgggagggttctgggggaatagcatcttatttgctgcatctttattactagctgtgtggacagctgtgtaaactttggtgctcggttttggattttgggactctgttttctcctctgtaaatggaaaataatacacacacacacacacacacacacgcacaaacacacacacacccctgcatatgttatactactatagatggagttagcagatgagagagagagagagagagagggagagagagagagagagagaatgactgtattggggtggtgaggggaaagcttgagtagttaggaagaacatgaaggaacaaaaagaacaaaagaaaacgttgacaaacagagagaagaagcattcatgtattcactcaataaatattcattgagggcccagtatgtgccatgcattttccagaagcaaagggggaagaaaattttaagaccaggaaattactgtcaagcgatgggatcaaaattcctacttttccttcatcttggacacacattcactggagttccttccccctcttctgaggttacacgttgtccttctcagcctaccctctaagcttggcaggagatgcacaggtaactttaagtttctatcctctggcctttcatcctgccccctccagtcatctcaaatattgagaaccgactcagcatctactgtgtacagagcagacacctcagggcttcatggaccactggggaagacacggccacacccaactgtggctgtgtgatggggcacataagaaacctccaggttcattcccaaagcggatcccaggcagacacaggtcttgtgtgtggagctggggaaagcttgacaaaaaaagagggacctcgttaagaatctaaaattagttttctagggggaaagtgagaaggtattccagcctaattggttaagtagctacaacaaatacagctagcactcaataaggcttgctgcattagataatttttaattgaaaatttcaaaactggatatattggagaacggatccaggaggagaagtaagatctgttttcagtgaaaatattttatgctcacaagaaagtgtctcacgtgagtgatcatcccttcttgcaattactgaacagtccaaataaggttctcaagttgaataccatgggtatcatcttggggtttggactcctttggatttcacgttagattattaagatggataaacattgacagtggactaagagactaagagaaataacatctctgtgctctaacctttacatgcattttatatttgattctcacaaccctaataattcacatttgtaaacaaggaaatgcgtccaaagtcactgagctactaagtagccaagattggactaaacccagatcagatccatctctcaccaaaagccatcctcttaaccactgtcattagaagtgttagatccatagttggtattagaccacaaaggttacccaggatataaaacgtgtccattcaatcaacaagtaaatattgaacatctgttatgtgcccatgactctgcttaatacagagcttggcaattgattgggtgtagaagatgcttatgagggatgatgaaataagagtaccatacacagggctagggatgtttgcagagggtgatgatttgagacatgccatgtgctaagcttgacttcagaactgagtctgagagcagtgaagggtagttcaagtgaagtgtcactggaaattggaaataatgaaatagaacttggttagatttgtagatagatgctggagaagcatgagcaacaaagtgatggtggatgttgaaaggatggcccttagtgagtctataattcagtctaccagatgatttttacatgaacaaatgtccccacttatcatgcggtttaagttttacctttacctactacagggaagcataaaaaaggttttgataacccgggtaattttgtgaaagtttgaacaatgattgtatcaggcattatagatggagtgttttgactggggagtattctgactgcatggaaatccatgccaactatactgcaagcggcttgaaggcaggaaccaggtctctttttatgaccatgtgcctcttctcagtctctcagcacgttaggcctaacacagtgttaatgagcgaatgcacagtgagtgaaccaaccatgtgggtgaaacgtcctctccttttcatggtcgttagttggacacaataggattgtcccaatctgcccactcacttaggtacttacctttgctgttctttttgctggggtcatttgcataaaaagggcagagtgacatggctgagctgttggaagctccattgttctgtagtgacttaattgttggcttgccctggacaaggctttatgctgatttggttctaagcgtgctcctgcttacccaggatgtggcacaaatagaacatccactggcttccaccagtctgctgaaactgctctctaagtgtcactggtgtccttctaatcaccagagcttgacttctgctccagcactgccgaccatactttctttcttttcatggcctcgttagccttgcaggaactgcatttccatgcttctttgtcctttgactcttccgggttcttcctacacttcctccaaggtaatctctgactctgtctttactccaccttcttatatggctgcattctctacccagcagcaaagtcatacctgctcctgtggtatcaattatctcctctgagagaggactggcaaatcgtggttttgtatacctgacattcttctgagctcctgactcatatttccagaattttagcctgaaactttaaatttggcatgttttaaaaaaaatttatcatctcctcttgtgatccttttccctttcttttcttttcttttttttttttttaattttttatgcacagagtctcgctctgtcacccaggctggagtgcagtggtgcgatcttggttcactgcaatctctgccttccaggttcaagcaattctccttgcctcagcctcccgagtagctgggattacaggggcccacaaccatgcctagccaatttttgtattttttagtagagagggggttacgccattttgaccaggctgggcttgaacccctgacctcaagtgatcttcccgcctcagcctcccaaagcgctgggattacaggcatgagtcaccacgcccagcctcccacagtgctaggatgacaggcgtgagccaccacgcccagcctcccaaagtgctgggatgacaggcgtgagccagaactatcgcacttggcctcagtgtctaaaacttggtggagggtggtaagttccatgcaaactggagcacatacctcatgactagagaaggcagctgcttcctatttccagtcaattattgccactttgccatttttgtggtatttaagaggaaatagaaaattgtggatctttgtgtgtgaaatctcccatttaaaacaagttggcaatgatttctttcttatattatattttattttattttatttattattttttgagaaggagttttggtcttgttacccaggctggagtgcaatggcacgatctcggctcactgcaacctcctcctcctgggttcaagcaattctcctgcctcagcctcccaagtagctgggattataggcacccaccaccatgctcagctaattttgtatttttagtagagatgggctttcaccatgttggccaggctggtctcgaactcctgaactcagctaatccacctgcctcggcctcccaaagtgctggcattacaggtgtaagccactgcatctggtctctttcttatattttaaacaatcccatagatcaaacagaacacattcttgtggccaaatgttagcttccaacttctgctctggttcctgcagagaggagcaggcagagaagaaacttttctcttgcttatgcagttgcatctcttgacatcatttctgtgggttactttgctgtcagggcctctgtcttcttattcaggctatcacagactccttcaaggaaggatgaggggagaaagaagctcgtcttgggccaagcttttccctagtggagcacatagagctttgaggcttccatgttccctcccattagcaagtgcaatgtggggactggggctccccaggcaggatctggccacatgcaaggggtctcccctggcctgccctccttgtttcaggtcacttgtgatattggggggaaaggggtgagcagccaagaacagatcattcagccactttagggtttataaaaatcatatagatggccgggcgcggtggctcatgcctgtaatcccagcactttgggaggccgaggcgggcggatcacgaggtcaggagatggagactatcctggctaacacggtgaaaccccgcctctactaaaaatagaaaaaatcagccgggcgccgtggcaggcgcctgtagtcccagctactcgggaggctgaggcaggagaatggcgtgaacccaggaagcggagcttgcagtgagtcgagatcgcgccactgcactgtctgcctgggcgacaaggcaaaactctgtctcaaaaaaaaaaaaaaaaaaaaaaaaaaaaaatcatatagataaactttatttcagacccaaccatttcccaacacctgaacaccattttcaggatcatcccatttcatccactggggttttgaataatcccagtgacagggagttgaccccctattggtggaagttatttcatttttatacaatgctaatggttgtaaatatcttccttataatgagcgaactattcttcccttgaagttaactctgctcttggaagtcacataatctaattaaagtattattttgcatgattgcccttgaaacatgtggactgcatcatatcagagtcaaatcttctttgaactaaatcttctcattccttttaccattcctcccatggcctagtttccagaacgttcatcattctatttagcctcctctgaaccatttccagtttctttcttgacattcctctgagctgttgactcagagttaatatcacataccatcttggtatgagcaacacaaacccagctggaactaaatgaggtgaaattaaatcagaacagatgcagggttcttcaccacatgctgttgctttgtttggtggggtcagtccctaaacagaatttcccctgaattctgaaccaatggagaaatgagacagggggcttaagacatcagctttattcctgatagatgcattggagcacgggtcttaggcatgtggtaataacggtgctcagccaaggcaaggtcgaaaagtctcaggcctcacccacagatggggcctgggctgggcagctgggcttagcacaggtgtttataggctgggaggttggaaggaagagacaatagggtccacgtgagggtctggcctcttggattttctcctctccttctcagtcctgatcatttcctccgagttgtcatttggttctcctgctagagagagaaaagacctttgcaccaggcaaaatgttcatgtccaattctttctgccaaactcaccaatcagatactttgctccacctccctggggggaggagggtagaggagccagaggggccaggaacgtcacactgaaagctatccctccatattgcagacagcataggaagtggggaagaagtgttcccctgtcacactaggtccagaaaaccaacacttctgactgggcatggtggctcacgcttgtaatctcagcactttgggaggccagggtgggcagatcacctgaggtcaggagttcgagaccagcctggccaacagggcgaaacccaatctctactaaaaatacaaaaattattagggcatggtggtgtgcacctgtaatcctggctactctactcaggaggctgagacaggaaaatcgcttgaacatgagaggcagaggttgcagtgagctgagatcacaccaccgcactccagcttgggtgacagagtaaaactctgtccaaaaaaaaaaaaaaaaaaaaaagagagaaaaaagaaaagaaaatcaactctctgaatagcggatgctgtgtctaaactgcaaactgcagctggtatgaaaatggtccagggaggtttgactgtgaacttaaatggggtcagcactgggctgtttacccccagtgagccccccatccatcttaagcttccctcttaagatatacagtatctaaatgaagatattagactactcactagttctgcactcatgagaaagctgcttcacctctatgaggttaatttttctcacatataaagtggaatcatgattgatatctcttctaagtattaagcaagattgtgaatatatattgctgcctgatacgtagtagctgctttataaaatataatgatttttacctattttctatcttttccagttcagtaatccccttggcaaaggagacaaaaggaatataggcgatgagagttctgccttctgggccattcattaatgtgcctcatcagcctcatacaatagtgccctgctcctttgttcttttgcactctgactgtttcttggctagcaagccctctttttgtagcagacttgctttgcaggtctcagcttaatcccagttttcactgacagatgcttctccagtgttgagacccttggctctgtgctgtctaactttggttcatgcccttttaagctctgacctctttgagagcttctgctgggaccactctagcctcttgtgttttctctcctgattcttctcagtcctgataatttaccctgagctgtctttttggttcttctgttacagagagtctttgggaggtgctggactgtgaagacctttgctctaggcaaactgttcacctgttgcattgcctcctgagtccccatctctctatgaggcagggcattacctcttaggtggggagcgaagggtgctgactgggagcaggatgtgtgattgatgtgagccgtggctggggccgaagctggttgttttcacagctcatgttttcagtaccaattgcctactatgcacgctcgagatacagtgtggagcaaaaacagaataaggccctgcctcatgaagcttaattctagcggaggaagacataacacaacaaaccaatgaatggataagatgatctcggtgccacaaaaccctcatggccaggacagtggtgtgactgtgctgttgagagccaccttgtatcagaggcttcctatgtgtcagatactgtaaggagcactttccatgcctaatttcatttaattctcacaaacgccttataagataatttaaaaaaatattatgggccaggcacggtggctcacgcctgtaatcccagcactttgggaggctgacacaggcagatcacttgagcccgggagttcaacactagactgaggaacatggtaaaaccccatatctaccaaaaatacaaaaattagacgggcatggtggtgggcacctgtaatcccagctactcggggaggctgagccaggaggatcgcttgaacctgggagtcagatgttgcagtgagctgataatggaaaaaaaaaaatcatgaaaatctttaagtgtacacaagaggagccaatgtacacagtatactcaatacccctattctagagtgatcatggtccagatactgatgaaatggtttttattattaaccccactcaacgatgaagaaattgaggtttttcaagagtttacataactaaggccaagtgacaaataagtaattggcagtgctggaattcaaatgcaggtcttttagctcaagaagataatataagcagtgcaaaaaggtagatggcaagtgtgctccccttgagggaaaggggtattggctgccatctttttcagacctgctcagctgacccaagcaccttccgcattcagacacagaatcttatgcaaagctgactttcattccttaagaaagagaactccttaccccatagcaccagagaacactaaagactgaacagccaggaacttcctgatctccctccattagcaggggtggcacttctccagtgagcaatcataagtgctctgtgctcatgaagcttgtcactgttttccaaatattcccagtcatgcccggggtttgttacctggctacctttagattactacttcagaacctacctggtatgttgttaaagaatgaagtttagggaagagctagagaagaagacaatggcataggagggttttaaaaaagaactctgattagcagtgtggaaaggggattagaatccattcattcgttatttcaccaacacttattgagcaactctgtgcctggtactgggaatatagtggcaaatagtatgcgttcatgacattgaatcaacttgcagtatagaggagcaggtaggcaagaagccagtatattgcaggacagtataatgtgtgagagttcagagaagtgggcagaagtgagaagaggcaagaggatgtaggagactggggtagaggccatgagttggaagggcaagcagccaactggagggactttatgaaggaagccctgtaggacttgctgtcttattggacctaggcagagaagaaaaggagagacccactgcacattggactctccctatcatggctctcatcatatgccctttctgattcttcttttgactgcctggatttccagatggaccatgagctccatgcagggaggcactatggccccagtgaaaaacatggtgtccacaacaggctcaaggaatgaatgcatagacaaaggaatgtagagaatgattctgagggtctgagggtgatttttacaatgaagagaaaccataggtcttgcgagactgaggaagaggagctgactttgcgaaaaatattatatcttttgtttgagacatgttgaatttgacatgccaaggttgtattcaggtggtggtgtccaaattaaattggagaaatgaggctaaaatacaagaaacagcccaagatggaagataaaattagattaatcttccacataggtaggacaaatgaagctctgaaacctaaaaagatatctgagagacgagtgtagacagagattaggacagggcactgggcggtggggtccactcatacctataggataggaggtggaagggagacctgggtggtgtagggttccaaggaaaatagttacaaacaacatccagtatggaggagagagaaaatgagatgagctgatagctctgctttcactgccttggggataccgattagagagaattctttcaggaaagggcacaggaaggagtcccagtgcaaaggcagcaaggagatgatgttagtgagcaactctgaaaatttgagaattttggtggaaaagggaaggagaagatggggaattagctccagggaacatgaagatcaaaagaaaaagtttggtggaagagagaaatttggggagtgatttggagacccagaaggaaggacttgaagaagagacattaatagtacaaaaaggattgtgataactgatgaactaggaggctgttgcttaagagataaagaaaaagtggacactatagacatcgcagcttttgttctagtttgcaaggctaatatgacatgttattggttagaaaggcaatttacttatataggaaatcttcaattgtttgtggtgccagtgttggttatagggtagttgtataagatgtgacaatgtactgcttgtagtcagtagaatagttatgagaataaaatgaaatgagcatgccaaatgcttagtgttgagcctggctgcatagtacacaaacagtgaatgctgctgtaggaaatcaaagaagacaaaggacaataaagtaaccagagaacgcattatgatgaaaataatcctggctactttctgggctggaacaggtagtcccatgttgagcttatatgtttctgttcaattacatctctcctgtttatgaccctttcatattctttatcagcattctctgtgactatttatttaatatactcttccctctcaagcaattgttctttactgggagcaatttggttacctaggggaatatttggcaattctggagatatttttggttgtcaaaacctatagggtagcggggagtgacaacatgctacaggtattgagtgttgaggccaggatgccactgaacattctataatgcaaaggacagcccctaccacaaaaaatttacctgacctcaaatgtcaatagctctgaagttgagatactttctcctagatgacgggtcatgtcattcatgtgcatcatggtttccccaagtgccaggtacaaagcaagtcacatgatgggtgccccataataataaagggaatggagatttaactgcaccttgaagaataggccaggtctgaatatatctcctgctttgagtacaaggtgtcagaagatgctgtgagcatttcggaaagaaagttcacaagagagattgcaaacattctggctcccaaagaatgaaagagaggaaacagccctggggctttatcaggagactgacattcccataaacaagagagtcttggaacaaaaggtctggaactgcaggtaatacaagaacacccaagactacaagcagttcattgtttttacagatagacttcagccaaccactgaagcagcagagatggaatttttaaatagacacaaactagagacagttcctttggtaaggcacaaaggtgaggcttctcagccccatagtggggctgcatgcatacagagaaggtctccacctcgggacagcttcttgaatccggtggatatcaactgtcactgtgtgtcagaatcaccttggggcttttaaaaaataatgatgcttgggcacccactcccagagctcaagtttacctgatctaaggcatgtgcctgggcattggtgtttctttagagcgcctccgtcccaggtgaagctaatggatagccagccctactttacaaatgaaccacagctcaaaatcttgtataaacaatttctctctccaacaccttatgtactcagttccactggatgtcttgcgctttatatgcttgaaactgagttcttgatttgggacccttccctacctggcccttgctcagggttccccatcttggtgagctgcactacccagcattctgtagtgaccagaatcccaagaactccccttcattctcatttctctgcccatcttctcccctgcccgcccatatacaattcgttctcggtgctgaggctattactttccaactgcacctagatatgtccacggctcgtcacctcccctgcttctgatgtagtcaaagctaccgtcatttgttctagggctactccctggcctctgggattccacttttgtctctttaagttgttctctgcagagtaggttgagtgtctttttctggcttaagacccatcaaaggctttctgctgtagagaattcaaacccaaacttttgcccaagaccagaaggccctgtggaatccgagcccccagatcccacacctctctcccctgctagttagcttgaagcaccaagctctaaagtctttccatttactgttcttttcaccgggaatgctttttcctccaccctttacaggctggcttcttcttcaccttcatgtcttagtctaagacatgacaattaactgcttgtagtcatgcttttgttttgtttttgtttttgtttttaaatcttggcactattgacatttggggctggaaaatttctttgtcgttggaacttttctgtacattataggatgtttagtctctactcactggatgacacaataatctgctccccagttgtgataagaaaaaatgtctctagacaatgccaaatgcctcatgaggacaaaatccctgccaactgataactactagcttaaatattaacttcttgaacaggtattctctgttctccaggctttaagtctccaggtgtatttctcaatcttcatatcctatttgttactttcatagaacttttctcaccttgaaattgaatatttatctagtaaatatctgtgtcatagtcccactagactatcttgactatttcattcaattctgtaatgatagcattgcgtacggctcctggtatgcagtagatgcttaataaacttctgttgaagaaatgcatgcacgcatgaatgaatgcatgagcaaacaaagactgctaggcaggcaagtgccttcccgccagggttagagagattatctagcagtgcaaaaagaccatggactaaaaaggaatgagataatgccccttgcagagacatggatgaagctggaagccatcatcctcagcaaactaacacaggaacagaaaaccaagtaccgcatgttctcactcataagtgggaactgaactatgagaacatagggacacagagagagtaacagcacacatcggggcctattggggtgggggtgagggtgaggggaggggaagtatcaggacaaatagctaatgcatgcagggcttaacactagggtgacgagttgataggtgaagcaaaccaccatgccacacatacagctatgtaacaaacctgtaagttctgcacatgtatcccggaatttaaagtaaaataaaaaaagaaaaaaagagcatggacttcggaatcgttagttgcagcttctcagctctgccagcttcttgctgtgtgacctgggtcagataattaacatctcagagcctcagattactaatctgtaaaatggggatactacttttgagagtttgcttaactgtgtaatcttccctgctctctcccagaccccacgggctttggatgcttcttcatgtgcccttggcacctggtgcaggtctctatcaagggctcaccatcaccaaggataggatcacactgtgccgtcagtgccttatacagagccaaccacatcataggtgctcaggaaataatgtctgtgcggtgtatgaccaggaatcaagtcgtatccgagatttgaggtcttgtaggtagtttgctgagactattcttatacgggttggtccctggaaaaatgagcaatcccaggtccttccttggtgggctgtgggaatggggaggctgtgcccctctctgttgttcaggtgggcattctcgtttgccaaaaattgagaagctacgcctggatcctcttacctctttttctgttttggtcttctgcccaggcctttgcaaataatgaatttaacaaagatgttgtctgagtgtctcttagacccagggaactgagtatgggcagctgttcctccttggtcagagcaagcgaactgtcatgtatccaaatgtttctagcgagagggtcctgtgaatggaattgtcagtgagttctagtttgctcatagcatgagtctccctcagggagcaacccttgaggttttctacctgctcagaaactctctagagaaggctacaccctgggcatgcatttcccttgaactagcttttcctagtcccactaggagagtaaatgacaaagctgggccctgaatctaggtcttgcccatctctctatttttttatgctcaaaactcacaatccagggaaaaatatcctttctcttagcttgggcagtgttgggcagtctactgaagatcacatgtagtaggagacaggtagttcactttattggtctcctggaactgctgtaaaaaagcataacagactgggtgccttaaaacagcagaaatttattcactcacatttctggaggctgaaaaactgaagagcatggtactggcattgctctttctttctgcatcataacatggtggagggcatcatatagcaagagggcaagagcatgccagcttaggtctctcttcctcttcttataaagccaccagcccctcttgggggccccattatgaccttatctagacctaattacctcccaaaggctccacctctcaatgccatcaacatatgaatttggggattaagtttactacacatgaaatttggggaacacattccaactatagcacttattagctaaaagttgctaagaacttttttttctggtagcacaggttttggctgcatggcaaatgcagaagtcaacagaaggagcccacgtacatcagggaattggtgatcagagtcacctagactgcaggggaaaaagccaaaccaaaagtcttacaggtagagaagatttggaagaggcacacatcccaagcaaactacaattgatgcacccctgcagagtctacagaaatgaaaagagaagatcgaaatatcatcatttttcattctcccgagttttaatttttatttatttattattatttatttatttattattaaagtagcagagattgaaaactaagataaaaaatgccaacataaccaatgatacgtttagcaggattggggaaagttcatagcgctagccatggactctgagttctccactagactgtaagaccttgaggccaagaactgtgtccatcttggtcaccattgtacctgtagcacctagcccagcatgggggagcagagagaagctgagtgaattgattaaattcattggttgtggctgacctctaaagatgttctattaactctgagactgtgcacagagaagactttgtgtgctgctgtccatggaaagaaagcttcatcttgtgttgctgctggggagctcaaacaacactggacatggatggtactggactggtagagcatctccctcttgtattatgtaaagaagttctaacatagaatgcataaccatagatagaagttcattatcagttttatttaataagcagttgttcctgataatcaaagtgattcagatatcacttaaggtcaccatgctcattaagtcaagagattatgtgctggagtccttacatgatgacctaaggcaggtctatccatgccttcaacagcatgtctacaaattcccaagcttgtctttctccaagtcacctctggctgtgatttctagtgaagatgaactctcatctctcattctttactctgttatcagtccaaacatgtaagagccctttctccttaatcacttaaccttaacccacatatcgaaaaaaaaaaaaaaagaaaaaaaagaaagaaaagccatgcacatagatcagatgaaagtaatacgctttccagaaaattcagggctcctctgtcatcacagacattgtaaatattagactgccccattctttttaaaatctaacttttttttttgggacagagtctcgctgtgtcacccaggctggagtgtagtggtgtgatcttggctcactgcaacttccacctcccaggttcaagcaattctcctgcttcagcctcccaagtagctgggactacaggtgtgtgccaccagagctggctaatttttgcatttttagtagacatggggtttcaccatgttgctcaggctggcctcaaactcctgacctcaagttatccacctgccccagcctcccaaagtgctgggattccaggcgtgagccaccgggctcagccctgccctattcttaacataccacttagccatttccaccaacttgatttcccaacctccagaaatgttgctttctcttcccactcccacttcatctctttgagatgtcattttttcctctttccccactagtgtctttagcagaaagggaagggtgctgtccagtagaaatatttctattttttttaaaacctaagtcaactcaagtcacaccttggttcaaaactttctgatgatatctctcgtcacattttacaataaaactcatggtcttccccatggctgaaagcagagtttctcaacctcggctctcttaacatttgaggccagatggttctttttggtggggtctgttctatgcattttgggatgtttagcagctctctggcctcaccagatgtcagtagcccatccccatttttacaatcaaaaatgtctccagacattgtcaaatgttccctgggggggaactgaaaatcactgacttaaaggccacatggactggccttgaactactgctgtaatttagctccttttattctctttgattgttctgctctggttaaaatggcctctctgctgtttgactgagaattatgttcctgtctgagagcctttgcacctgctctgccctgtgcctggtgcactcttccgtgaacatggcatcctggcacccagtcactattctgttgcaaacacccattcccacctgacgccaatacatttgcttattgaatgtctcccatgacctcctacaagctaagcttcatgggatggggacttggatggttttatatgttgccgtgtccccatgatgtagaagagtacatggcacatgctcaacaaagagctattgaaagaatgaggtaatgaataggcaggaacacacaggatggagtaagtagcacatatgtgagatgattaagaaatcagcccaagtagaatagaaggtatgtcctaaggttgggaaatgtagaaaactcccccacagtgggcaaatgatagaagttattgacatccagacagcgtactgtatccaccatctatcagacaagtgggtgtcagagcaggttcatgagctggggagagatgtggtaagaatggagcagaaatgagaagcctggattcaaccggaaaaccatgcaatagaagcgtggatccaactagaaaataacacaatgctctggtgtgagtgagggtggcgaattggtttcctctgtggttggtgaggagtactggagtgagtagattctaagggagaggtgatttgattgaacagtgtccatggtggaatgagaagtgtaagctggcccaggtaccaagggtttgtcatctctgttgtaaagaactaggtcaatggtggtaattagcaatgaaacagaaaatagaaaactgtaaatcacagacatcttggattttattcaagtttggcaagttgcatcttgtaccattatattttggaagcggctgagtgagtttttggtcatgtgttggcaagaatgacatcctgtcagccaggaagcatctttcccatgaaaaaaagggacattagtaaggctgccctacttagataaaaccttagataatgataaaagggaccttgggatagtggggcaatttagttgtatctctggttagttttctcttttttgtgttatgctaatcttaagtaaatttactttttatgtagttgcttaacgtgtttttacaagtgttactttacttgtagcaattcttgtgaaatacatggttggaacattaacaaaaaatttctattaaccaagccacaggaaaacataggagaatgaacaaaagaagccagccacaaagaggaccgatacctatttccatctatttaaaacaaaaatcaggtaaaacggatctatgctgttgtaagtcaggatcgtggtaacctgtgaggggtggggacaactggaaggagatacaagggagatctctggtgagctgttgatgttgtttcttaaccttggtgctgattaagtttctctataatgtataatacatagcagattggtaacctcaaaaatgctattgcctattcacaacgataggtgaaatatacactagtcattgattcacggaagttgactatattcagagagaatgtgttagacaggaaatacaaacaaacaaaaacaaccaaccaaacaaaaaaacaggtgccttagaatcttatggacgtagggttcaaatggcacctctgcttttttacttgagtgaggctggaaactttttatattctttctgaagcttggtttcctcacctgtaaaatgggaaaaaatgtgcacttttatgggagccaattggaagctctaaatagccaaagctagaagagttagagcaacacaacaaagtagtaagccataatccaaagtataaaatcaatattcatgagtccaaactgatataaataagtgattgaactaattaataagcgagggagaagagataaatctcctgtgcagaattccaaataatgtatagagctattccaccctaaagaaggaagagcataactccccactttctcttttcttttctttttttttttttgagagagagtccccctccgtcaccaggctagagtgcagtggcgcaatctcggctcactgcaagctccgcctcctgggttcaagcgattctcctgcctcagcctcctgaatagctgggactacaggcgcgcaccaacatgcccggctactttttgtatttttagtagagacggggtttcaccatgttggccaggatgctctcgatttcctgacctcgtgatccacccgcttcggcctcccaaagtgctgggattacaggcgtgagccaccgcgcccagcctaactccccagtttttaagtgtggcctgtgcacaacggcttcctttcaaagcgtacagcttgggaaggggaaaaagcaactgtgcagtggagaaaactgatgaacaccacttcaaccaggtcaacatcttccaggtcaacatcagcagcagtcttaagtcacatgggtgctatgtacccttaatgtgatgtgatgtgatgaaatggcattttacctctgtgatcttcttcccccaaacctataatcccagtctaatcaggagaaaagcatcagacaaattcaaatagagaggcgttctacaaaatccctgatgagcactccgtcaaactatcaattatgtcaactatgtcaggtctgagaacctgtcatagcccacaggagtctaagcagacaggatcactaaatgtaacacaatgtcctgaacaggatcctacagcagaaaaaggacattaggtaaaagtaacgcaatgtgaataaagtatagaatttagttaataataatgtatcaatattgggtcattaattgtagaagatgtaactacatcatactaatgtaagattgttgttgttgttaattttttttttttttttttgagatagggttttgctctgtcgcctaggctggagtgcagcagtatgagcatgctcactgcagcctcaacctcctgggctcaggtgattctcccacctcagcctcctgagtagctggggccaggggcgtatgccagcacacctggctaatttttaaattatttgtagaggcagggtctccctttgttacccaggctagtctcaaactcctgggctcaagcgattctcctgcctcagcctcccaaagttctggaattacaggtgtgagctaccgcacccagccataagatgttaataatagggaaactgtatgcgaagtatttgggaactctcggtactagctttctgatttttttgtaaatctaaatttgctctaaaaaataaaatctgtttttttaaaaaatgtgcatcttaccttaggttgcaagcataaagtgagataacatatataaacataaggctctcaaactttttggacttagtccccttacatgggcaaaagtcattagggctcacctaccccacccattcccacatcagctttgtgttggttcacatgtgccctaagggtaatgcgaattttcacggtgaccaggtcttagttgaatgctgaattacagtcatctgtacagttcagtttcctttgtgaatatagaatcgagaaacccttcctaagttatgttcctattaaaaaatgaaggtcatttaaaagaaaaaatctgatttttaggcactgtggacagatggcggggctcagggagggtgatgaatgggtccagggagcgagtacagggcaagaacatgaaactgtgagaaggtgatgggttgtgcctggactgtgatacttcttcatttactcaattgttcattctgtcattcggtaaatatttactacaggcgctcagtgggtgtggggtctggaacagtgaaccagacagcccaagagagtccgtactctgatggagatcacctagtttcttctctttcctgcctgtattattttccaatgagtgttcccttaaggaggaaactggagttctctataaaagtaaactatgacatattcctagaactttcctattaataacattcaccaatattgtaattatttatccaatgtgcatcttctctctagaccagggtttctcagccttggcactgttgatatttgaggatggatgttggctggcagatgttgagaagcatccctggcctcaatagtagtctgtgttgtgacaaccaaaaatgtttccagacattgccagatattccccaggggacaaaattgtctgtggttgagaatcgctttcctgcattggtggctctcaatcctggctgaagtttggaatctcctgaagagatctcagaaactgttgccagtggataccgacccctatccaggccaattaaatgggagtctctggggatgggcattgacttttttttagattgtagtgggattgaggagtgagaacctctttcctaatcagtatgcgtcatgaagccagggagtatttgtcttctgtgggtgggtgtttttaggacctaacacaatgatatctgaatgaatgagggaacaaaagaatgaaggtgaagacaggtaggaagatgtgtcagaagttaaaagtggcaccgggacagtacaggaatgtgttttgcaaagagcaaacctgggtttcacggctgactctaccacattcccgttgtgtagctttgggcaagtgtttaatttcccgggcacttcagttgctcatcttaacacaggaatcacaagaatatgggagaattcttcataaaggttatgttccaagaaaaatgcatttgtttccattaaaaaaaattgacatgaaaaatctagctatttcccaaggcctcctcacccgacaactgttatccgttaagaatgctgagggcaaaggaggagggaggtcaagtatttgctcttcctggattaagagttgagcttttattttgacctcagggcagtcctaagtatgctagagttttgttgtatttctctaacattttattataccttaatctattttatggggaacaggcaatgtcaacatgagggtggcaatctgatggattgcctaagtcttaaactaaagggtggggaaagtccacttcccactagtttcccacaggctttctaccagctaaacagctttgattcagatgacctttgtaagtgggaaactgtaggtcagggatctccaactcaaaaggctatggggtcagggtaggctgcattactgagggaagctggtgatgggaatgtgtgtgtgtgtgagagctcttgatcagtgaaccttgtttcttcaagtgcataccccatcagagggggagccccggaggtcctcagcctcagctgatgggtcccttgtgggaatgccgactcatctcctggttaatcaagagaaaccattgatctgggttttcaggtacaatctcccgattctgagtctttgttcaaatttttgcaaaattcattgtgtgggacaaatgaaatgcctattcagatcacatccttttactgatagatagcagatcttcaatttgtgtttgtccgttctaccataagaagtgagattccactatgagaaagggtcttggtgcctctgaagataccaaccccgtaagcacctccaccttaagctgctggtagttgaagacatcattggcaaagggagcactcggaggagctttaggggcaaggacgcataaagcagagctgtgatctttggctgattcatcgctgtggctagaaaagcagtgaggaccttctgagagaactgatctgaaaacctttttggttccagaaactggagggagccaatgaaaggagtagtgtagtgtcggttttttaaaaaaagtttccatttatgggccaggcgtggcgactcacacctgtaatcccagcactttggaagactgaggcaggtagatcatgagatcaggagttcaagaccagcctggccaagatggtgaaaccccgtctctattaaaaatacaaaaatgagctgggcatggtggcaggtgcatgtaatcccagctacttgggaggctgaggcaaagaattgcttgaacccaggaggcagaggatgcagtaagccaagattgtgccactgcactcaagcctgggtgacagagtgagactctgtcaaaaaaaaaaaaaaagttaccatttatttaataaacatctggagagcagtggctttgtgccagaccttgttccaattactttaatatatcaaattatttaatccttcgaacaactctatgacccaggtcctactgtcactccattttaaagatggggaaactggggcacagagaggttaagtgacagccaaagtcacacagctgttaagtgacagagctgggatttgaacccaggtctcccagctccagaatccaggttatcatcatttctcttggctgtattttaatagggacgattttatctatagtaatgaaaaattatggctttgaagactatgtagaaatatgtaaaaccagtctatataatagtaatttaaaaatcagctgtcaaattgtatgtgtgctataactgttaaagaacgatatgtaggaaaaaagactagaagaaaaagaacatgaacattatgagagttatgcaatatggtgagattatggagaataccttcttttattgatctcagtattgactgtgagcttttatttcttgtatgatgttttattaatgactaaaaaacatttacaggtttgtaaatttatcccccatcttccttctttctgaatgtagcttccaaaggacagtgcttgtgttccagggcacatgcatcccagcactcagtcctgtatttacagggtggatgcgttttattcaagaggcctggcctgaagaactcccaaacacgcgttattcacaacgtgcccaatttaagacttgaaccaacaaatgatggggtgtttccgttcaccagctaatatggtgcccccatgtggcagtagcataaatacactttgcaactacattacacaattcctaataccctcaaattcaaggtgattcacattatttcccttttgcacataaactgagtctttattaacatttttagaattaactgctatttcaaattcactccaatcttgtacaaatgggtctgtagtagtcattgcctgtcccaagttgatgggtttccaggctgctagagacagaatgatcccaaatgacatagtttaacaccaacctcagcattttctctgccctgttgagcacttactatgagtcaggtgccctcagcactagtgacaaaggaccctctctcagtttgtaaggcacaaatattctagtgccctcttcaatgcttattcatccaacatgtgctttttattgagcatccactatgggctaagccttgtgctttggaggatttgaatattttataccccagttgtttatatcctaatctgtgcctggctccaaactacctctgctgtgtcttagctgaatgacttaatccttctgtgcctcagtttcctcctctgtaaatgggtgatggtaacattacttaccccccagggtgattgagaggattcagtgagtaaatgcatgtgaactagctggaacttggtaaacatgcaatccatacttggtgtgcttattttcaaacaccactgttgggtaactcttatgaaacacttccaacttctcacgaaagccctggctttgttgccaggtttccggagtatacaattattttcccctctcctcaaggagtgattccttagccacagactttttcaaggccctctgacccctgagctgcctcaggacttcatagacaccaggcctagcacagcctgatctctaacatcataagtcagaaatgacgtcacggttacagccacgatactgatgacagccattcacaacacgctgggccagtgcgaaatcctgtcttgctgactgcccatgccagtctaggagggggtgttatgataatcctaccttccatgtgaggaagtggaggttccacatggttatatgtgactttcccaaggcttgtaagtggaagagaagaatcaggcagtctgagtcttaaccaagatgttcagctgacagtcagtagaggcaaactctacatttaccaatattgtgagtggaaacatctgaaaattaaaataaagacacagttttattttttaaaaagactgatgtagtaattgtttggaataggctctattaggcatttcacaaatattaactgacacaggtaccattatttagcccattttacaggtaaggaagcagaggcagagagtaattagaaaggctctctagggttacacaggcaggaatagcagggctagactcgcacccattcgcctatgccacactgcctcatgggtaaacacaagcagatggtctcccgtgatctttggcttcattaatttactgccaaacaaaaaaaaacctcagatttagttaggagagactttattcaaaaggattattgcagtagagggaatgttctgaccacttaatctgcaagtgtctcaagatgaggcagtaaatattttgctttgctaaagaggcataaacaaggttagaaagaagtgggtgttgggggctgggatgatcagagtgacacaatcagacagtggttgagggctgatcaggaaggtctgtaaagaggagttgtctgctggctcaggctgagggtgggccaggacctggggaaaggagagactctacaccaaagttaggttaacgaacactttgttccgactgaccagtggaaacaggcagttaaactaaccacaaaaacaaagaaagggagtttggaggctctgggtctggccttgtcataggtaaacaagtgggggcacctatgagtctcatctaagtcatatggggaagggagttctttgcagtgagctgtttcccagaacacaaaagggtggggacatttcttaacctttgcaattttccagtatcacagggcttgcctaaagttcaacactgttgtcacctgtaggctcttccaaggaactttcctaagagagtcagatcctaggctcatgaagctgctcaaaggcactgccttccaaaatgtgacaaattatcctctactcaaaggaaaaggagtcaagatcacaatgtctcctccttgctcgcatccctttacctgccacgctggcttctttcactcagtgtaatggtttcaatgttcatgctgtagcaagcatagaaacttcattcctttctatggcttaataatatctcactgttgggtataccatattttttatccattcattagttgatggatgtttggttagtttctttttttctgttgttatgaataatgctgctatgaacatttgtgcacaggtttttgtgtaaatatatattttcatttatcttgggtacacacctaggagcagaattgctaggtcgtctggtgacattatgtttaaccttttgaggactgttttccaaagcaaagataactagttttagtgtctgcagtaagtgaaaaagatgttcaggaaagacactaaaactaactcgagaaagaagagggattattaggaggatgtggaatttcttaaagcatacatggggaagagagcacttgaggtttaccagagagtggaaagctatcatgagccaagaagatgctcgtctatgtctgtggacaacatctgacctcagactctgctcttatttgtagctttgcctcttgttactcttcaagaggacttagcccatatctccatgtgcatgaaggaagacagccacccagtccccccatttgctattgagtttaatgacctctttggtcagacagtatcggacactgctttggatcttgcagccacaattccacatttctgaaagagaaaagctggttgactctggtccaatcagccccagacaagaggtggagttacacaggacaattataaccttgtggacccctgtggggaaggggaagctgggaagctctcagcatcttgtgtggaggcacacagtgttgaacacatcaaagtgtttgtgggatgcaaggccaaaggaaggattggaaagtgcaaagttcatgattctcaggtggatttggggagcagatgatggacttcaggtttggatacaggtgacagtttgcatgccttcatggtcagcagctctaagtgggtggatgacccctttccccctctcttagctctctagagagcagcagataccctgattgactgtttatgtgctccgtagagtcaaggtcatggtgtttgtctctgcactgcagaacagttttcttctctgtgcagaaggaacatgctgggcatcctgatatcacacaagcctctagggggaactgggggctttaaaatccatggcccccatatatctagctgtgccaataataaggcagaagcataaggtatggtacctcacaaaatgggaaaggctgtccacgaaacacttggtctcacccagcagggtgtgtataaccaggctctagatacttttaactccaacctggttcaaagttagttattttcaggttaattcataccctttcttacagaccacaagaggatcatcctgggattagcttgcccaaacctcccttctctgctgacacagatgaaggagaaggtggctggtccagtacgacagtgactcatgaacttggatttaggatccaatagagtccaggtcgatccctaccatctgtgtgatcttggcatctcttgttttcagtttcctcatctgtaagataggaaggataatttctactgtagacatttggggaataattttataagacagacttgaccactactggtatttaggggattccagggagagcacacacagcactggtctgcagtctggtgaacttgccagtgtccagcatctggcctcagcactgtggatccagaagttggatttgtccagcaacaggtccatttcttcaggaactgggctcacaaaatggttatacacatatattatatattagtaccagaattctaatgcattaatttacactaagacaggtgtctatcacatggtccagacacttgcatgtgtttcagttggtaccatctcctcctctggccagccccagggaggaaaccacttacactcaagagctatttgctgggcaatgacatacatggagacataagaaggaaggagatggagcaaacgttaaatgcaatcagtgatggcaaccagaggcgttcatctcataatggtggtgtcagaaggacaggagtacacacaccttttgccatgactatcattctctctctggcagtgttcgcacatgccaaccatgctaggatctctctctcttccacctttttctacacttagaggactgaccagtctccattctaattagcatagcctttaaaaaaagaaattacagaagaaaaataagtacttttttgtagcaaaaatggtaaacattacaagataaggtccaccctccattctgcctgtcctcctaaggaaaacttagggaatctctccttccaaattcttttttattttattttatttttttacatttccacacctcgctatttatggcatcaactctccttcttttttgcattaaaattggattttattaattattattatactgcaaattattttatttcacttaacaaagcatcttggagcaatagccatgtcattgtcaatagttctattccatctttaaaactgctttgtcttattccattttgtgtaccgtaatttaggtacccattctcctattcatagacatttaagttaattccttcttttgcttttatacagtgttgtaaagaacatcatttatgtgcctgcaagtatttctctaggataaatactgagactttttgggtcaaaagataggccaattcacactggtggattttagtcctgcacatgtttatcaatagtgtatgtgaacacctgccctctctttgcagacagtagatttcaggcccctgttgttagcttggaagcgagatctctttcctgcccactcacatactgatctttgagttgattctctgcatgtactctgattttccttatttcccaattcttggcgggcatgtctgactaccaacaagagatccctgcaggagtccaaggaagatcacatgacacaggcaatgtgaaatactttcttattaaaacaagagagacgttaactgttatatgtttattatggtgtatgtagctcaaagggtgatttaatgttcatgttatcttcaacttaggaatttcagacatcaacgttttgcacttgtgggtataaaacactttttcctgggtccctaataccctcttggctgggttgggtatactcccatctcaaattctgagaagcttaagtcatactttgtgtattacattagtctctgttttcacagagcaatgcaattagggctttctatctggtttctgttgtaactttctttttaggcttgacgtctattccatggctcagggcagaccatggatagggaaaaaggcccaggagggtgagaaacacaggtggccatgaactttttataatccagcatgaactggcccccatgggcagcctctgttattgccctgtgtctccaaaaggcaaaaccgagtccaaagtatgagtttgtaatgaatgtttgactgaaggttttacagagtgagtgaagttacatcaaacactacacattatagattactgaagctacttccattggatgccttggttttccttcccaattactttggccaccagccactcctggactacccttcccccatgcctttctctttccacctatgcccactcacaacccctaattctatattatgcccctttctttatatggggaaatgtatctgtctggcttggcttctcctcccacctctccacttagaacataaagaaacttcctcaggaacccctctcttcagagagcatggagaatcgtaaacaacgtaatatgttttccttgttaaatattttctcctgtcactctggtttgacctcactccctactcccctgaccctatgcaggtggtgattgcgggcttggccatgctttgtgcaagtatctggatgagctgggcttcacggtatttgccggagttttgaatgaaaatggcccaggagctgaggaattgcgaagaacctgctctccgcgcctctcggtgctccaaatggacatcacgaagccagtgcagataaaagatgcttacagcaaggttgcagcaatgctgcaggacagaggtactgccgccagcaccctcagtgcctttaccctcctcctgaatgcccagctcttgttccggcttaggctgaacatgcccccccactccactctgggcactgtttgccctgaagcacacctgtgctgaacccctaccatgtgtgggggcctctatcaacatgaagaccttcggagtaactcagacatgggcccatccacacagaacttacagaaacctcagtctcattctctccaacttctcagtcactctcccatgaataattcctccagccccagctcattgcttttctgtccgcaatagcaacatgcattagagtctccagcttcgaaaaaaaataccttcatggtcactgtccttctttacccattacccttcctcttctctttccttcatggctacgctccacggaaccctgtagctctgtgattctcttcctcaccttcaatttgccgttggctctcactctgcctccctaactgatctggcaaagctaatcagaattagcctgaagacccaggttttttttgttttcaacttttattttaaattctgggttacacgtgcaggatgtgctggtttgtgacataggtaagcatgtgccatggtggtttgctgcacagatccagccatcctgtaagtactgagcccaggattcattagctattattcctgatgctctacctcccctccctccaccaggcccaagtgtgggttgttccccaccatgcgtccatgtgttctcactgttcagcccccacttataagtgagaacgtgtggtgtttggttttctgttcctgctttagtttgctgaggataatggcttccagctccacccatgtccctgcaaaggatatgatctcattctttttaatggctgcatagtattccatggtgtatatgtaccacattttctttatccagtctatcattgatgggcatttgggttgattccatgtctttgcttttgtgactagggctgcaacgaatctatgtgtgaatgtatctttgtaatagaatggtttatattcctttggatgtatacccggtaatgggattgctggaagacccagtttttaacttccctgcagtatttaagcatgttgtttatactctcctccttggctttggggtccccagcccccattgctctcctagctctccaatctttctttccacttctcctggatgaaactttgcctctgtctccccacaaatacaaatgcttctgagggttgcatctgcagacttcgcactctatgtgccctgggccatgcagttttctccgtataccaagagttctcaatccaactgcacattagaatcatttgaaaattacctatgctggggtccaggatgggctatgtaactaacttggcagacccaatgcaaaatgaaaacatggggcccctagcttgatttcggaagattattaggaatgttagttggtgacagcagagactgaaaccacgtgcaggacccttctgaagcaccaggccctgtgtgactgaacagatcccccagacccaattaaatcagtctctaggacgggatcccaggcatcattagtttataaagctcccaatgtgatgctaatgttagcgcagggccaagaaacactggtttacgccaataactcccaaatctattactatattgccaacctaatccttcttctccacgtatacaaagttatctatcagacatcttcccttatactccagaggcttcaacttcaacatgtcaaatgttgttttttttccccctgctgccattctgcaaatcggtttgctctcctgcatcccacagctcagacactggctctaccacctaaccagtcattcaagccagcaacctgcgggtcactgagaccctcagcttatcctcagtgcctgtatcctactgatccaagtcctgtcaattccacctcctggatagttaccctccagccccttcctaccactgcatagcactacgacttagcacagaccctcaccttcttccacctcggctatcccaatgccctccttgcaacccatctttccttccccattactttccagagactcatcttcacagcattcacattctacagtgccatccatctcctaaaaacctttagacatacagagcctccacgtgttggggtccgcccatgtggcatgcccgtgatggggaatttatcagtggtttgttggttccctatcagtggttccctatctaagcaccttaacaaggactagaggtcctttcaggataatggctcctgccaaacccttaatttgcaatacctgctggttcacttagtaaattctgaagagtttctggaacagaatattctactttacatctctgcacatctagcttcctgttacaggaattcccctcccactcccactccctttccctaaggctcttgcctttgtccagtggcagactctaatcccccaggagacctggctcacacgtaacacctcttgcatggtcttccaggtattgcaggttgtgttattcacttcctcttccagacactcactcattatggttttctgtctccaggactgtgggctgtgatcaacaatgctggggtgcttggctttccaactgatggggagcttcttcttatgactgactacaaacaatgcatggccgtgaacttctttggaactgtggaggtcacaaagacgtttttgcctcttcttagaaaatccaaagggaggctggtgaatgtcagcagcatgggaggtgagtcagcattttcacacatggtcatggggtgcccatcacaagacatggctcatggcattctatgtgggcgaacaaaaatgcagggcatgcaaaggcagggttgggtcaggattagtcaaattgtatataccctgttggtcttatcacaataaaacctttctcttctttcaaattctttcatgtagaaactcttatctgccttctaactcatccatttgttactggggatttagggttcttatatgtctttataatgtgactgccaacacacatggttggtagatttgtacaggaaatctcacattacaaataatgtcagcatttcaggcaacctgttttcaacacttcgtcaatttaacacactgtgttcagttccctgtaagctgagtaggcaataccttccctctgtttgtgccatcaaacaaaagctgcctgctattgttaacccgaagattgtccccagtgttgagcagcctcaatccagctaggtcaggatgtgatgacactggatagtttgtctctctctgtttccaagaacaaatagtacacaacttgagtcaagggctgaacagtcttgccttttcataaaaaatgcccatgcgtgtcatagcatgccctcttttctgggacagacattttcaaactggggttccttgggctcttgttcagtttagggaagatccatcgacctgacttttgggtcactgggtcactgcagaggtgagagggaagccaaagggatgggctctggatcctaggatcctgccttcaaatagaggagtaccactcttcactgttggatcaattaattctaagtaaaatttcttaaaataaagggtatgactatgctgtttttgtttgtttgcttgacttttgtgttttgtgctttttttggtaatgtgaatatcagttctagaatgatttggtcagggagggggttcttcgcatttcctagacaaatatagttgtccatcacattccctttcctggctttaactcagtaactttcttaaaactaactgctatgtgtctttgactagagtcttggttggcctgaggcataaacaaagaagaaggtagggagagagagagagagagaaagagttgggggagacgaagtgtcctctaggatggttaggagcaatgagtattatattttagctgtgtgagaaccctaaagtagttccaatttcctgctaccttgccaaagcaaatgaatcctgagaaaacacacagcaatattttcctaatctttgttctgaacttagcctttacaattttggcctgtgtggaagcctcacctttctcatttccctggaatagtctggtacttctgggaacgtctcacagactctttgcctcacttatataataaatatttactgaaataacagagtactgcctcctccttggcacactgacaaggaggtttctcttttttttcctctgttctcaactttgagcaacaccttcactcatatgagttcactttagttattgccaaaatgtgcagtatgtgctgtaggcccagtgtctggcatgcaccagcagctcagttaatcagtgaagaaatgcaagtgtatgaacgagtgaaaaatggaaaatggattaatgaatgggtaagtgaaaagcttacagtacaaggccaggtgcggtggctcaaggatgtaactccagcactttggaaggccaaggcaggaggattacttcagcccaggagtttgataccagcctgggcaacatagtgagacctcgtctgtacaaaaaaattaagaaaaaaacaaacaaaccaggcattgtggcatgtgcctgtagtcccagctactcaggaggctgaggtgaatctgttgagcctgggaggttaagactgcagtaagctgtgttcatgtcactgtactctagcctgggtgagagagtgagacgctctctcaaaaaataactcacaatacagagcataaccttccacatatcttcaacttggcctttaaagctctttccaagccagaacttcttactctgttgtcatgtattttcattgaagggaaactctgaatgttaaaataaataacatatctcactcttttattattattattattaatttttttttttgagatggagtctcactctgtcgcccaggctggagtgcagtggcgcgatctcggctcactgcaagctccgcctcccgggttcacgccattctcctgcctcagcctccctagtagctgggactacagacgcccccaccacacctagctaatttttttgtatttttagtatagacggggtttcaccgtgttagccaggaagatctcgatctcccgacctcgtgatctgcccgcctcagccccccaaagttctgggcatatctcactcttattctcaccctctggttgtgcaaattcattacacccagctatgtccatctattttcttaagatcatcaccaagttaacccatctgaaacaaaacttgctgtcagccctccagaatgcctaggaatacagctaactagggaggtgaaagatctccacaaggaagactacaaaacactgctcaaagaaattggagatgacacaaacaaatggaaaaaatctcatgttcatggataagaagaatcaatatagttaaaatggccactctgcccaaagcaatttatagattcgatgctattcctattaaactaccattgaggttcttcacagaactagaaaaaaagatttaaaaattaatatggaaccaaaaaagaacatgaatagtcaaggcaccactaatcaaaaagaacaaagctggaggcatcacactacctgaattcaaactatactacagggctacctgtaagcaaaacagcatggtcctgtacaaaagcagatacaaaggtcaatggaacagaacagagaacccagaaataaaacaatacacctacaacatctaatctttgacaaacctgaaaaaaacaagcaatgggggtaaggattccctattcaataaacgatgctggggtaactggctagccataggcagaacattgtaactggaccctgacttctttctgccctagtcttttgagtttcagatctttgagtcatcttggatttgtttttccccatgcctctctcttctttctcccacccactcaccaagatgtatgaagttttcgttcatcacatccagttttgaatcttcatgtcctggagaaactctagaaatgagtttatttgtaggactcagaaaccacccaaggtactttataaagctactaaaacagtaacaagaaatcaagtaacaatatcagaagagatgggaggcatatgtactcaacagggccgggagtttgtgtaaagacagaaacaaagcgctgtcaagataggaaaaagatatttcatgcaaatgggaaccaaaaagatcaggagtagctatacttacatcaggcaaaatagatttcaagatcaaaaccgtaaaaagagacaaagaaggtcattatatagtcataaaggtgttcattcagcatgaggatataaccattgtaaatatacatgcacccaacaccagagcacccagatgtataaaggaaatattattagaactaaacagagagatagacctcaatacattagtagctggaggcttcaatactccactttcagctttggatagatcatccaggcagaaaatcaataaagaaacatcaaacttaatctgcactatagaccaaatggacctaattgttatttacagaacacttcatccaaaggctgcagaatatgcattcttctcctgagcacatggatcgttctcaaggatagaccatatgttaggccacaaaacaagtcttaaaacattttaaaaaatgaaataatatcaagtatcttctctgaccacaatggaccaaaactagaaataaaagataagaggaattttggaaactatataagcacatggaaattaaacaatatattcctgagtgaccagtaggtcaatgaaaaaaattaagaaggaaatttaaaaatttctcaaatgataaaggaaatcaaacataccaaaacccatgggatgtggtgaaagtagtactaagagggaagctggctaccggctataagtgcctacattaaaaaagtagaaacacttcaagtaaaaaacctagtgatgcatctcaaaaaactagaaaagcaagagcaaaccaacctcaaaattagtagaagaaaagaaatcataaatattagagcagaaataaataaaattgaaaagaagaagacaatacaaaagatcagcaaaatgaaaagttggtttctggaaaagataaacaaaattgacaaacttttaatgagactaagaacaagactaagaacaagactaagaacaagagagaagacccaataaaaatcagagatgacaaaggagacattacaaccaataccacagaaactcaaaagatcattagaggctactatgagtaactaagtatataccaataaattggagaacctagaagagatggataaattcttacagagagcctaccaagattgaaccatgaaggaatccataacctgaatggatcaataacaagtaacgagttcgaagcagtagtaaaaagtctgcaagcaaagaaaaggctgggacctcatggcttcactgctgaattttaccaaacttttaaagaagaactaataccgattgtactcgagtattctgaaaaataatggtggagggaatacttccaaactcatcctatgagccctatatcattctgatagcaaaaccagaaaatacatgttaaaaaaaaaaaaaaaagaaaagaaaactacaggccaatatacctcatgaacgttgatgtaaaaatccttaacaaaatactagtaaactgaattcaacagcgcattaaaaagatcatttatcatgactaagtgggatttatcctatggatgcagggattgttcaacatttacacaaatcaatcagtgtgatacataatctcaacagaatgaaggacaaaaccatatgatcatttcaattgattctaagaaaagcatctgataaaattcaacatccctttatgataaaaaccctcaattaaaaaaaaactgtgtatagaaggaacacatctcaacgtaacaaaagccatatacaatagacctatagctactgtcatgctgaatgggaacaaactgaaatcctttcctctaagatctagaacacgacaaggatgcccactttcaccactgttattccacataatactggaaatcctggctagtgcaagcagacaaaagaaagaaataaagaacattcaagctggaaaggaagaagttgaattatccttgtttgcagatgatatgatcttatatttagaataaactaaagactccatcaaaaacaattaaaactgataaacaaattcagtcaagttgcaggatacgaaatcaacatacaaaaatcagtagcatgtacttctttttattttagacagagtctcgctctgttgccaggctggagtgcagtggcgtgatctcggctcactgcagtctccacctcctggatttaggtgattcttctgcctcagcatcccgagtagctgggactacaggtgtgcgccaccatgcccagctatttttttgtgtgtgtttttagtagagacagggtttcataatgttggccaggatggtttcgatctcttgactttgtgatttgcctgcctcagcctcccaaaaggctgggattacaggcattagtatgccaatagcaaacaatcagaaagagaagtcaagaaagtaatctcatttacaatagctacaaataaaatgaaatacctgggaattaacctaaccagagaagtgaaagatctctacaatgaaaattatataatattgatgaaagaaattgaagaggacacaaaagattgaaagatattccatgtccataggttggaaaaatcaatattgttaaaacgtccatactattcaaggaaatctatagattcaatgcaatccatatccaaataccaatgacattcttcacagaaatagaaaaagaaatcctgaaatttatatggaaccacaaaagactcagaagagccaaagatatcctgagcagaaagaacaaaactggaggaatcacattacctgacttcagattatactacagagccgtagtaaccaaaacagcatggtaccagcatgaaaacagacatatagaccaacagaacaggatagagaacccagaaataaatctacacatctatggtgaactcattttcaacaaatgcaataacatacaccagggaaaggacagtctattcaataaatggtgctgagaaaactcagccaggtgctgtggctcatgcctgtaatcccagcacacagggaggtcaggtggattgcttgagtccaggagttcaaaaccagcctgggcaacatggcaaaaccatgtctctacaaaaaatacaaaaaattagccaggcatggtggcatgtgcctgtagtcctagctactcaggaggctgaagtgggtggatcacttgagctcagggagatagaggctgcagcagactgtgatcacaccattgcactccagcctggatgacagagtgagaccctgtttcaaaagaaagaaagaaagaagaaagaaagaaaagaaagaaagaaaggaaggaaggaagaaaggaagaaaagaaaagaaaagaaaagaaagaaaaaacaaactggataccatatgcagaaggatgaaactagatccctgtctcttaccatataaaaaaatcaaatcaaaatggattcgatacttaaatctaagacctcaaactgtgaaactattgtactataagaaaacattagggaaactctccaggacactggaattggcaaagatttcttgagtaacacccaacaagcacaggcaaatgagatcacatcaagttaaaaagcttctgcacagtgaaagatacaatcaacaaagtgaagagacaacccacagaatgggagaaaatatctgcaaactagccatttgacaaagacttaataaccagaaaatataaggagctcaaacaactctacaggaaaaaatcaaataatctcatttaaaatgtacaaaagatctgaataggcatttctcaaaagaagataagacatacaaatagcaaacaagcatatgaaaatgtgctcaatatcattgatcatcagagaaatgcaaatcaaaactacagtgagatatgatctcaccccaggtaaaatggctttcatccaaaagtcaggcaataacaaatcctggtaaggatgtggagaaagagaacccttgtacactgttcatggggatgtaaattagtacaattgctatggagaatagctctaaaaatagagccaccatattatccagcaattccaccgctagatatgtacccaaaagaagggaaatcagtatatcaaagagatatctgcagtcctatgtgtgttgcagcactgttcactatagccaagatttggaagtaacctaagtgtccatcaacagatgagtggataaagaaaatgtggtacatatacacacaatggagtactattcagccatgtaaaagaatgagatattgtcatctgcaataacatggatggaactggaagtcattatgttaagtgaaataacataatgagcataaagacaaacttcacatgttctcacttatttgtgggagctaaaaattaaaacaattgaactcatggagatagagtagaaggatggttaccagaggctgggaagagtagtggagaggactaaggagggggaagtaggaatggttaatgggtacaaaaaatagaacgaatgaataagatgtactatttgatagcacaacagagtgacaatagtcaataataatttaattgtgcatttaaaaataactaaaagagcataaatggattgtgtgcaacacaaaggataaatgcttaaggtgatggagactccatttgccctgatgtgattattatgtattgcatgcttgtatcaaaacacctcatgtagcacataaatatatacaccaactatgttcccacaaaatattaaacattaaaaaaaaagaaacaaagctctgaaatgatcgattttcctctgtgttagtttgctagggctaccataagaaaataccacagacaaggtgtcttcagaaaacagaaattccttttctcacagttgtggaggctggaagtcgaagaccaaggtgtcggcagggttggtttctcctgagctctctctcctcggctttcagatgactacctttttgctgtgtcctcacatggtcatctctctgtctgttgcacccctggtgtctcttcctcttcttataagaatggcagtcatactgaattagggcaccactcttatgatcccgtttaaccctaatcatctttttaaaggttctatcttcaaatgcagtcacgttccaagatactggaggttagtactgccacatacaaacttttctgggtggtggggggagcaattcagtccataacactgtaattgataagggacaggggaattcagcagagaacacagtgaggggctctctagcacttactggagagttttgtgaaacaatagaaaagattttgagccggaaaagaaaaagctagaatgtaacacaaggattagaaaagtcaaagtatgtgtaaaaggcaatatataaccaacaaatccacagaaattaacatccaatgtgatgctgacttgttgatatatctttggcaaaatcaatgtaatagtaactttggaaacatgcttatctgggagttcattgctgttattttcattttgaagcaaggtgcatggagggagagaagcagtcagtcactaataagggctccagaagaagcacgtggttgccctgacccaccagattgtcttgagtctggcacctctgtcaccttctgagtgacaagaattttggtggcatagatttatcatggaactttgcaccagccaggaaaaactgagctggaattgatgactctgttccagttattcattgctgcagagtaaataaccctgaagaaactatctcaggctgttgtgagtaggcagctggtctgggaggcagaataatgggtccccagaaacatacacgtcccattgtctgcaacctgtgagcctgttacctcacgtggcaaatggtactgtgcacatgtgattgagtgaaggatcttgagatgaggaggttatcctggatattctggatgaatctgatgcaatcacaagggtccttataagaaagaggcatgagggtcagagtcagagagaaactggaagatggtacctaggtggctttgaagatagaggaaggggccagaaaccaaggaatgcaggtggcttctagaagctggaaaagtcaagggaactagttctcccctagagcctccagaaggagcatgaccctgctgactccttgattttatcataagataataaatttgtaatgtttaagccactaggtttgtagtaatttgttacagcagctgtgggaaaataatgtgtctggtttgactttaaacgagctccaatttataacaaatcacatgcacctaattaccgattccaaacatttttcttttttctcctcaaatttaaacttcattcctcccaatctcatgtaattcaggtctccatgaacactttctcctcattctttacaccatgttgaaggaacgcttagcactttatcgcattccaaaaaggcagagtcaatcaaacagattttactagagattccatatatcacaaagcactatttaatgcaaattcccttcagatttttgtggttgttgttgtttttgttttttttgtttttcctccttccgaaggtcttcagttgccagccacctcacctctggttacttccccctccctgtcctttctggctcccaaatctccctggtttctttcctcatctttccctctccttccttctcccataaccagcacgttcatatcacatccatctactcttagctgctcaataaactaagcacttccattggatctgccctccttggaaggcaagaggtgtgcagaatagaagaaaaaattattgcaaattgtgtttgctgtttatttgtctgctctattccctccctctctgaaactctcagaagcaaactgaagctgttcccgcatgaacttccctaaattctcctctctccttctgttgtcactcattctcctcttcaacctttcctccttcctcctccccactaactccttctctctccctgggcctttcattctaccccaggctatgctctaaggatgattcctccccagactctcaatacttttctctttgatctgggctggcagccaggagggtggggctctcctcttcactgcctggttgggtgacactcctggaaaacccgaggtcctatagcctctctaagctccacttttgtccctgtaaagtggaggcaataagagtggacaaataagcagaggaaatatgaccacataggagcgttctgaggcttaaataaaataattctcacaaagttcttagcatagctgcttatgtgtagtatgtcttccctgaaggttatgagttattactatttttattaatggacactgccccgcacttctttatttttaaaattaattttagcttttattttaagttctggggtacatgtgtgttccattgcagcactattcacaatagcaaagacacagaatcaacccaattgcccatcgatgatagattagataaagaaaatgtggtacatatgcagcatggaatactacacaggcataaaaaggaatgagatcatatcctttgcagggacacggatggagctggaagccattatcctcagcaacctaacgcaggaacagaaaaccaaataccacatgtcctcacttgtaagtgggagctgaacaataagagcttctttacccctttttccctgagctccttcaaaagttaggtgacttgcagcctctacttcttggcaacctcattaacccattaaagtttggctcctttgttttccgttaaagactgctcagttccctgtgcccactggccacttcttatcctccttgctgtctctatcaggcagaatttccacaccttctcctgaccttctatctgcttgtccagcctcagtgagaagttccatgtgcctctcatttgggcagaggtagccagagttggaatgtacacattgcttaaaaggatgtttgcctgaaagttcaaactcccaaaatgtcctcttcaataggtttctttgcagctttttgaatatgcatatgaatataaccacattttaaaaatccattcatcagttgatggacatttaggttctttccaacttttgactattatgaataatgcttctctgaatattttttgtacaagcttttgtgtggacactataaattttatgtaagtgttagctattatttctatcactttctgtgtccttgggaaagtcacttaaaccctatacactttagtgttttcatttttaaaaatgaggttcctgaggataatactagaatctacctcctatgacagttgtgaccattaaatacattcagagctgatgttaaaacgctcagaacagtgcttggcatatagtagacacctaataaacattaagagttattatgaaggatccattacatttcaggcatttgttgaatgctctcaggtatatgaccccaataacctatgtaatgttgctattctcatttttcagttataaaaaccaaggtcagaagggttcagtgactggcctgtaagctagaacttgaacttgaactttagtttcatgttctgactcaccaagccacctccttccctggtgactcagtgtaaacatatgttaccaccacatcaaacactaagtcaaagggtctcagatgctcttcccagtggtaccttattgaccattttttgctttctactagctccactgttagatgcttgttccagcccaactcccattcttgtgtggaaataaagtcaacataacccatgtcttctaaatacactcctacgggtgggaagttccaggagtgggatggggagaaacattacttctttaagttcttctctaagaaatgcaatctagagtcaaccatgtccttccctccggtgtccttccctcctacatcttccatccctaaagaaaggaacatgaaagggaaagagtaaaagacatcatgtaggaatacaggtaagaatcttctaggatgccaggcaagcagaatgaagacagactgcccgggttttaatccggtctctaccaatgacaactgcgtgaccttgggaacagttctgaacctctgagttgcagcctcctcattataagataaggataatagtaattgcttcttctggggtccatggagagatgagatgaaataacacatgtttaagcatcagtcttgtgcttggcatgcagtgaatggtccagtagcattagcgacccaaaaaccatcccaccatgaggatctggggcagcagctgacagtctgtatgcttgcagcttcttaatctgccagctgctggtatcaccacctctgactgtgacaccgaattacccttcatcctctgccccgtcacttactagctcctgaggagatgaccccaacaggtaactccttccagatttgaccatgtctactacaggagacttttccccattgtaataacatgttgattatccctcccacataaatagcatagctctttaacccaaatcccagcaaggcagttggataaatatttaaccaagtatcagaggcatgggaggcaactctgatggtacaaagagcagttggaaaatctttctctttgaggcctaaagtcgccagttttgctcttcagaaatgttcgcataaacacttgtgtgcaattgcatgctatgctcaaaaacaagccctgctaaaatgacccaggcctcagagattttgtgtcattgtggcttaaatcttgctcttcggttactagctgggtgacctgggtcaggtcaccttacttgtcatgtctctatcttcaaatgagggtcatgtagcacctgagtccagggcaatatttctcaaccttggcactactggcattttggtggggagaattctttctgtaagggcactgtcctgtgcattacggggtgtttaacagcatatgtgtccttgacccactagataatagtagcacccacccctaattgtgacacgtcttcagatatttcccatgatctttggggtgcaaaatcacccccagttgaaaacctctgatcttggctgcagatttaaatgaaccatgggttttgagtgcttagcacagttactggtatataggaaatatccaagtaaaagggacctctcaacggagagagagtaatcacagttgcctgccacatcaaactgttctttttattattattttttttatttttttacctagaattagaggaagtggaaaacaattctaattgtacaaaggacagttggaaaattgttctgtttgaggcccaaaacctttctcgggccagttttcctccagaaatcgcagagtaaacacctgtgtataattgcatgctatgcttgaataagaagagttgaagataaacccctctaaaacaggtctccctctggtgcccaggttggagtgcagtggcacgatagtagctctctataaccttgaactcttgggctcaagcgatcctcccacttcagtctcctgagtagctgggaatacaggcacatgccatcacatctgctaatttatttttgccatggggtctcactttgttgcctaggacggtcttgaactcctggcctcaaacaatcctcttgtcttggcctcccaatgtattgggatcataggcatgagctactgaggccgtcccaagctatttaaaatacttcagaattactttataccaaagcaagcaatcttagagattcttacaagtctacaaattaaaagatctagaagagttcacagtttcagccttgagttctgtctcagtccagactgtgggatcattcctggacttttccttgctgagccagctgccttaaaagaatcatttggcaagtcattcagccagtctctcagctgctcagtggcaagatgggaagcctaggctgagattttcttccctgacactctttagggagattgtgggacaagggggaaagtgggtagagcaagactgagtgaacctcctcatgctgggttgtgtgagagatttacatgcctatagtcaattcattctaacatccacagaatgcagatattaattaattttctagatcaagcactctgtaacccaagtttgtgtaactggtaagtgataaagtcaggatatgaaccgggatctgttttactccaagtactatgtgctttctacttttccaggctgttaagcaagaacatgtcagacaaggaggggcataaaaaaaaaaaccctaactctgttctgtttaaatggtaatcaggaagtgttggcaatttagggctgtctcttactccattgcttctcaacactgacatatgtgggtatcacttggagatcttgctaaaaggcagaatctgactgggttggtctgggtggagcctaagattctgcatgtctataactagttcctgagtgatgttggcggtactaatccccggaccacattttcaagcttgagatgcatcagaatcaccggagggcttctaaatacacaattgctagaaatcaaaacctcaataagataacataccccctaaaatggccgtaatgaaaaaccaccataatataatatacaccctaagatggctataataaaaaaaaaacacacagaaaaaacacatgttggtgagaatgtggagaaattggaaccctcttatactactggtagaaatataaaatggttcagcagatgtggaaaacatttggcagttccccagtaagttaaacttagaattactgtgtgacctagcaattctactcctgggtgtatatgtaagagatagaaaagaggtgttcaaacaaaaactcactcatacatagatgggcatagcaacattattcacaatagccaaaggtagaaacaacttaagaatacataaaaggatcactggctaaataaaatgtggcatatccatataaaggaatatttttcagctttacaaagagtgaagtactgatacacgctacaacatgaatgaaccttgaaaacatgatgctaagtacacatacggtggggagagagagggtcttcacaattcttttgtaagcttcagaatggtaacttcaagtcccttatttttagcctactgtcaacaatatatcacaatgtaaaggaaataaaatgaccaccagaataatcaacaaagtgaatgctgaatttattcccctgccaggtaagggaacacagcccagggaacaaattgactgaatagttcacagaggcattcgggggaatatgacttagaagaggggatgatttttcgtgcctatgctaagtaaggatagaaagggtgcagtctacgtctaggaagagtggaaagagtccatagttctgtacattattgattaaggcaggtcttgttgttgactacgtatgtcagtctgctcagactgtcacaataaaatatcacaaatcgtgtggcctaaacaacacaaatttattttctcacagttatgcagtttagaagtcccagatcagcatgccagcatggttggttttctggtgagggctctcttcctggtttacagacaactaccttcttgctgtgtcctcacatagcccttccttggtgcatgttcaaggagagagtgtgaggtgtctggtgtttcttcttataaggacactaattctgttggatcaagggcctcatctttctgatctcatttaactttacttttttagagtcctcatttccaaatacagctatcttgaggattagggctttgagataggaatttttgggaaacacaaacattaagtccataacaaggtgtgttctcttaagttacctaatgttaggttattcaaagtgtctgagtaatgcaagaggaataagttacatagatctgctatacaacattgtgccaatagttaacaaagctgtatagcacacttaaaaaatatgttaaaaaagtagaattcacattaagtgtttttaccttgagaaaattaaaagttaaattaaaaaattagaggctgtaactggacagacaatgaagggttacataacgtcaaaaagccttaagacacagcggctcttaatcagcaactttggacacctatatttatctcatcttacgtcatcttaaacattaacggcaagattggatggatgaggttgaaccatacaatactgccatttcataggtaagacatggtctaatattggcagttcttgcagggttcaaattaatgcaaaagacaaatgagtcttaaatgtttgattcaaagcatgctttttgtttagattgtcaatgtggtatatgatctactgtcaacaaacttcatatgtcatgtcttagtctgttttgtgttgctataacagaatactgcagactgggtaatttataatgaacagaaattgattggctcttggttctagaggctggaaagtccaagatcaaaggggtggcatcttgtgagggtcttcttgctgtgctgttccacagcagaaggtggaagggcaagagagagggagaaagagaaagagagcgaaagggggccaaaatcccctttttatgacgaccccactctcaagataatggcattaatccattcaccccatcctcaacgcctaatcacctcttggtgcaccccacctcctaacactgtttcattggggattaagtttcaacatacgcttttggagggacacattcaaaccacagcgcttacccataaggcagtgcattatcacaaaagctcatgtgcacaaatatgtgacaaaactctaatgttcaaggtttaatattcaaaagattacttgaataagtattaagtgcagattctgattcagtgggtccagggtggctcttagtaatccacatagtaaacaacggctgctggagattctgaagcaggtgcacttattactctaagaaaccgtgaacatatggagccttttgggctattgagatattattttgaaaagcctgagtagcactaatggtagaaagcccttatatggagctactttgtgccaggcactattctaatatattattaatttaactttcgcaacgatcctatgatgcatggaccatcattattaatttacagataaaaaggcagagaccaaatataaagtgactatcctgctaacaggtggctaatcaatggcagagctaggatttgaatgcagtcagtgttggctcctctgctaacctgtttgtcttctatctgaccaaccttcaacatctataaaggtcatggagaagtgagaactctggctaaccccacgaactgggattgccacacagcccatgctgtgattttgaacaagttgctgtaacttctttggcctcccttattagtaatagaaaggagttggatttcaaacgctaagatttcatgaaactataaatcacttacataaaaatccgctggccatctgtggcaagattaaccagtttaatgagagtctgcttgatgccagacatcgtgttaaaattatatcagttaagccttgggaccttttgtgtttaagtgacagggccaaaccccaagttagcttacaccaaaaatggaagaggaatttactagctcttcaattgtctgagagacaataaattactagctcaccaattgtctgagagaaagaataaataagctcactggtgtctcttcttaaaagggcactaatccctctcatcatgaaggctccaccctcaggacttaattaccttccaaaggccccatctccaaataccatcacactaggggttagggcttcaaaatacgaattttgatgggggtgggcacaatgttcatagcacccccacccttcaggtaaccactgatctgttttactagagattaatttgcatttgttgaactttacatgaagggaattataccaaagagtacatacccttttgtgtttggctctctcactgcccataattgttttgagacatccatattgttacatgtatcaagttcattcccttttatggctgagttgtgttccatcatatggctggactacagtttgcttatccattcacccagtggatgcttctttcacttgggaaatctttgccaagcctgggagccctgttgttatgggtctagtcttcgtgtgagacttcatgaggcactgtgagccctactgtctttgctccttcataacatcagtgtcttcctgctgaagaccaccaggaatgcacctcaattcatattctggggctgctgtcacaaatcaccacaaacggagtggcttaaaacatcagaaattttttctttcgtagttctggaggccagatgtctaaaccaagtgttagcagggctgtgctccttctcgaggctctgggaaagaatctgtccttgcccctttcagctattggtggccctaggtgtgccttggcttgggcaacataacccaaatctctgcttccatcttcatgtggccttctcccttgtgccttctctttttctgtctctgataaggacacccatcattaattagatttagggcccatcctaatccaggatggcctttcctagagatccttgcctcagtgacatcttcagagactcttattccaagtggatcactccctttcttggcttcctttgatcttgccttccattacttccttatagctggtccagtgacaaactcagtttaaggctcaatctcaccagcttctaagctaaatatgatttaggtgggaaacagagcatctgctctagccctagaataagtcctttctcacatcctcttaaagagatgccccaccatttcccaggatgtatgttattcctcgttgcaacaagtattgagcacaatctgttcgattacaggtgctgtagtgggttgaatagtggaccctcctccccacaaaaagatatgtttaccaggaacctcagaaggtatgttggtcaggctagaagatcagggcctggtcggtaggtgctcttcatcttacctaaactacattgttttttttttttttttttttttttttttttttttgagacggagtttcactctttcgaaaggctggagtgcagtggcgtgatcccagctcactacaacctctgccccctggggtccaagcgattcttacgtctcagcctcatgagtagctgggattacaggcatgcgccaccacgcctggctaatttttgtgtttttagtagagacggagcttcaccatgttggccaggttggtctcaaactcctgacctcaggtgatctgcccaccttggcttcccacagtgttgggattacaggcataagccactgcggccagccctaaattacattttgcttaggagttggacaagattgagccttcaacttggtttgtcatcataccagctgcaataggggagccaaagaaggcagaagcaaatgaagctacactgtgggaatgagcaagaacattgctcacctgggctcagggggccttgcctgcctttgtctgcccaagtcactgataccagttcctacatacagtagacactgattaaatatttattggatgaacaaatgaacatttctaactttgcttctttttctcccattattcccataggaggggccccaatggaaaggctggcatcttatggctcatcaaaggcggctgtgaccatgttctcatcagttatgagactggagctttccaagtggggaattaaagttgcttccatccaacctggaggcttcctaacaagtaggtttctgagcccaagaacctgtgatgttcatcctggaaggaaccccgaaggtcctcttggtctgacagagcacacattgaacccctcattgttgtcaaagatgagcacagccagagatcagttaaaggggtgaaaacaggtttgattcagtaactgctgacagtaggggaaagagctaagctccattctgatttgtgcgaaggtgttttaaacattttaaaaggaaaaccagggagaggggaaagcatggctcagtaagtcagattagtgaaaaagtacaagggtccatcagtgtccatgcagaggggccagctgtgtctgccagctggcaattaaagaagtccagattctgtcttcccacagagacagagaaacagaggtctgatccttgatgattcagttccaaaggaatggctctcagatcctggagagaaatgcttctgcattgcaagagctatatatttacaatttaaagttcttttttagtaagtatttcaggaaagggaagtcagggacctctcagggatgtcttggatagaacaaatagtaaaattttctggcaaggttgagccttcttaggcaggcattttagggaggggctggtgttatccaagggacagggccttatgctgctagaaactgtgctggagtttcgttaagtctcttagtgcagggggttgggaaggggttgtcatgcatccagagctctccagctctcagtgtccacccagcagggcttgggttgcatgggcctcttctaagtgccatgctctccatgtatggcttcacccctgcttcctttcacaaaggaattgcgttggcttataagtcatcagcaagcagaggccacactgggttagaaccctggtcccctggtgcctgctctgagcgggacctttctgggacacacactccctccctcaatggtagagttgtatttggtctgtgggaacgcagctcaaaaatggtccctaactgactctcaccaattttgattattttcattgccccacccaaacctgtttaacaatgtataatccattagtttcatactaggtttctttatttggcttcagagcttattttcatctaaaagtttgagcagatagtcagagtaacatttattagtcttttgctgccattggccaagaaggtttccttccccagcttctttatatttcagaaacaatatttttctccttccctctgaagaatatgacccacctcccctccaccccaagaggagaaggcccttctctccactcccctccctgcatatctgaactctgggaagaggcagcctaccccaaggctcagtcttcagttctgggccatcaaacatttaaccgatgattcaagtgaagatgtaaaaagtatgtctaataaaagaccacagactgggaggtattgctaaatgcacgaaagaacaaaccctaaaggtttgaatgttatcccaaatgcaaaagataaaatctatacagaaatattgaaattttggcttgaaacacttgatagctgagaacctcctaaggttgcagagggggtgcaagactcagagaaagggacagagacccagagaaagggatatgggtcaacacgatgacaggcaggaccagggcgatagaaatgcagagaagatgaagtcttgagatgggtttccaacttggggactccctgggttgggaggagaattgaggagaggagatggagaagagacatgggtcagaggtgaagccaaatgtgctggttggactgagagactgggatacaaagagagggaagctgcttgagagctggtacaagagggaaatggtgaatttgattttgaatctggcaggaggattgagtgtttggtgacacagcccaaagagaattccaacacacagatgtaaaattccatttagacgagagagcaatcctgcagttaggttatgattttggagattcagtataattgctatgcataatagttctggagagctgttctcacccacttaccatacattctttactgatgttgatcttaatttttaaaatcgagaaatatataaacagaaaaaagcattatacgcacagggttcaacaaattattataaatcctcttgtacttaacacccagatcaaaaaataaaacattaccaacacccagaagcccctatatgatcctctaccatcacagccctctccaacctcccaataggtaatcacctcttactttttgtaatgatcatttatttgcttttctttgtagagtcacatccagcccacttaatagcatttgactttaactgcttttgcactttcaatggaatcaatatgtatgtatccttttgtgtctggcttctttcactcaatattctgattagacaatttatctgcactgtgtgtagctgtagtccactcatttcattgctgtgcagtattctgtgaatatgccatgattttctactgttgatgggatgtttgagtcccttctagtttgaacaagtatgaacaatgcagctatgaactttctggtacatgtactttggtttttgtgtgcttgaattttcccatgacacatgctgcagagtgaaattgttaccaaaaagggctcctgatccagattccaagagagggtttttggatcttgtgtgagaaagaatttggggtgaatctgtagagtaaagtgaaagcaagtttattaagaaagtaaaggaataaaagaatgcctacttcttaggcagagcagcagcatggactgcttgactgagtatacttatagttacttcttgattatattctagacaaggagtggattattcatgagttttctgggaaagtgggagggatggcctggaactgtgggttcctcccccttttagaccatacagagcaacttctggacattgccatggcatttataaactgtcctggtgctggtggaagtgtcttttagcatgctaatgcattataagtagcatataatgagcagtgaggatgaccagaggtcactgttgttgccatcttgattttggtgggttttggctggctgctttaccacatcctgttttatcagcagagttactatgacttgtatcttgtgataccaatcctgccaacctcttatctaatcctgtgattaagaatgcttaacctccagggaatgcagcccagcaggtctcattctcattttacccagcccctattcaagatggagttactcttgttcaaatgcctctgaaagaatgactagatcatagagttttcctgtcttcagctttactgaatcataccaacctgttttctaaaatattgctccaatttatacctctaccctttctatgtatactccaatcaccacaactctgaggagcaggtttcattgacattattctccaggtgatggtgctgagttggggtggataacatgcccttgggtggggatctggtatcccacgtacaccgtgatggtggaaaatttgagatcagatcctgagatgcagtgcctgggttcttccttttatatcaggctgccccccagtttaaagctatttgatgagctctctcaaggcaagaagcccaagagcagaaggctgagaactcatgtttggagaatgacacttcatacttatatttatttgaaggtaggggcaagaaaaggaatcttcagggacacagacaaggagcttctgaagacattctaagagacattccagatttttctggtgccctgaaataaagatagctaaatcatactgcatgctagattagcagattttaagtgctttatgtgcattatctcccttaatcctcacctgtgaagtaggcatcataatagccccatcttgcagtgagaaaatggaggctcagagaagttaaggaagttccaaagccatagagctgataggaggcagagatgggattttgatacaggtcatatcaataacttcattgtgtgcagcaccaaagtggcatgggagggatgggtagggagagtctgtcaaaagtgggagatgatgacggactgatggcaaaaggctgatggctttgtcactcacagagacagctttggggactctggataggttacccacaagagtggccagaaattccatgaggtgtttaaagaagaatgaggtgtcagcccacgaagacagggacaggggagaggtaggaggaggaatagtagctcacgaaaacatgtttttcaggacctagaaacctccagagtaattgtcatgataatcatttctttaagcacggtgtgtgccttcctgaaaagaaaggagcaattgaaactccgtttgcatttccataagtataattggatttcactggcctacatttccaagtgagcatccctccttctctgcagtcctgatatccaggagtcaccgaagctagcaagggctcatccccacagctatgtgaacaaccaagcactttgcaggagacagcgtgggagaccgcaagctttttggaaagtaatctggcagtagctattaaaattcaaaattaatgtgccttcgaccaggctgtactttgaggactcttgcctacagaaataaagccaaagtaaaaacgaataggtggtgaaagtcgatttactgcagcagtgcctgaaatgctgaaacctataggaacaactggaaggtcattggatagggaagtgattggctaaaagctgttcaatgggaaattctgttgctctggtttaatccatagacattgacaagaagggaggtctgtgatttattactaagccaaaacaaattcatggaaaatataaacaccatagtatgatcctttttgtttttgttatttcctggtaaaaaaaattaaaccaaattcttctatgtgtatgtatgtttgtatgaacaaggaaggaatgtagaagggcacacaaaactgttagttaccttagaggagattaattttaaaaatatgcacatctccttattattcactttatataatgaggaggcagagctgctacattttaaagtaaataaattatttaattttatatgataagcaggtattgtctttattttaaaaatatatttatacttaattgcatgtagtttgtgtattaaaatttatgtgtgaattatattaaaattacacttcatatatttttaaaaacataaatgaaaattatatccattaagtagattaaatatttaaaatcctgtatttatttatttatttattgagatggagtctcactctctcacccaggctggagcgcagtggtgcgatctcagctcactgtaacctctgcctcctgggttcaagcaattctccctgcttcagcctcccaggtagctgggattccaggcacccaccaccatgcccagctaatttttgtattttttagtagacacagggtttcaccatgttggctaggctggtcttgaactcctgacctcaggtgatccacctacctgggcctcccaaagtgctgggattgcaggcatgagccaccatgcccagcctaaaatcctatatttaattggtaggcattacttctatatcttaaaaaattatacgtgtgtatgcttatatgagtgtatatatactatattatatacagtatatattatattgtagacattacatgatatattatatatgtaatagtcaccaaaagatgagtgtctgtggcagcagcatttctaaaggcccagttgaaaataagcgcagtgcccatcacagtatagtggataaataattcatggcatttttatgcaacggaatactatgctgaaaggagaatcaacacacagtgcatggatgaatgtcacaaatatactgttgaataaagaagctgatgctaaacaatgagtgctattcatacgattccatttatataaatgttcaaaaccagccaagatgaatctgtcctattaatcaggaaaatggttactgagaagtgggctgaaaggagagattttaaggctggtcctgttctgttttgtttttttttttctttttttccctttttcttttcttaaaattggagtgtagctctgttgcccaggctagagtgcagtggtgcagtcatataatagctcactgcatcctccaactcgtgggctcgaggggtcctcccacttcagtctcccgaatagctgggactagagataagcaccattgtgcccagctaaatttctgtgtatatgtctatgtctatgtctatgtctatgtctatgtctatgtctatgtctatgtctatgtctatgtgtgtgtatgtgtgtgtgtgtgtatatatatatacacatatatatgtgtgtgtatatatatatacacattatatatgtgtacacacacacacacacacacacacacagacacatatatatatatattttagagatgggatctcgctatgttgcccaggctgatcttgaactcctaggctcaagcgattccccttcctgggcctcccaaagtgctgagattacaggtatgagccacggtgcccagacttgttttgttcttgatctgtttgctagtcacatgggctatcagtttggaaaaatccaattacgtgtgcacttttctgtatgtaggtttagaaatgataataaatgccattataaagcacacattttaaaaggcgtttgcaggccaggcgtggtggctcacgcctgaaatctcagcactttgggaggccgaggcaggtggaccaattgaggtcaggagttcaagaccagcctggccaacatggcaaaaccccgtgtctactaaaaatataaaaattagccgggcatgttggtgatgcctgtaatcccagctactcgggaggctgaggcaagagaatcacttcaactctggaggcagaggttgcagtgagctgagatcacaccactgcacttaagcctgagagacagagaaagactctgtatcccaaaaataaaaaaataaaaaaataaataaataaacgtcatttgcaaagggccatccttcccaacagagacaagcgcctgctccctgacttccttggccttcccaggatctgactcttccctttcctttcaccccagatatcgcaggcaccagtgacaagtgggaaaagctggagaaggacattctggaccacctccccgctgaggtacaggaagactacggccaggactacatcttagcacagcggaatttcctcctattgatcaactcgttagccagcaaggacttctctccggtgctgcgggacatccagcatgctatcttggcgaagagcccttttgcctattacacgccagggaaaggcgcttacttgtggatctgccttgctcactatttgcctattggcatatatgattactttgctaaaagacattttggccaagacaagcccatgcccagagctctaagaatgcctaactacaagaaaaaggccacctaggcaatggaagccctcaaagaagtcggaatgtcatagtcttgaaatgaaagggaaactgggaaactgggtttctcattaaagttgtttcccactctgta

SEQ ID NO: 745 - DNA, 47028 bp, Homo sapiens
atttacttctgtctgtatcaggaaacagaggcctgggtctagagacagggtcttggtgagggaaggactcaaaaccatgggatacagcatgaccgggcagcaccacagctgtggaaggtgagaaagtttggcagcatatgagtcaaggcatatggatctacatagagaggaaaagtatcctgtccttgggtaggagagctgggttgggcattagttggtagttttgtgtttactgatctcatcttgttaaaaccatttcatgatggttgtagattctggggacccagagtgtgaagggcctggagaagtggtgatatggtttggctgtgtccccacccaaatctcatcttgagtttaactctcacagttcccacgtgtcatgcgaggaacccagtgggaggtgattgaattttggggacaggtctttcctgcactgttcttgtgatagtgaatgagtcccccaagatctgatggttttaaaaatgggagtttctctgcacaagtcctccctttgcctgctgccatccacataagatatgacttgccttccaccataattgtgaagcttcctgagcaacgtggaactgtgagttctccattaaacttctttctttgtaaattgcccagtctcgggtatgtctttatcagcagcttgaaaatgaactaatacagtaaattggtaccagtagagtcaggtgttgctgaaaagatacctgaaaatgtggaagcaactttggaatggggtaacaggcagaggttggaacagtttggagggctcagaagaagacaagaaaatgtgggaaattttggaacttcctagagatttgttgaatggctttgacaaaaatgccaatagtgatatgaacaataaagtccaggctgagatggtctcagatggagatgaggaacttgttgggaactggagcaaaggtgactcttcttatgttttagcaaagagactggtggcattttgcccctgccctagagatttgtggaattttgaacttgagagagatgatttagggtatctagcggaagaaatttctaagcagcaaagcattcaagaggtgacttgggtgctgttaaaggcatttagttttataagggaaacagagcataaaagtttggaaaatttgcagcctgacaatgcaatagaaaagaaaaaccctttttctgaggagaaattcaagccagctgcagaaatttgcataagtaatgaggcgtcggatgttaatacccaagacaacagggaaaatgtctccaggtcatgtcagaggttttcacggcagcccctcccatcacaggcccagaggcctaggaggaaaaagcagtttcatgggctgggcccagggtccccatgctgtgtgcagcctagggacttggtgccctgaggcccagctgctccagccatggctaaaaggggccaacacagagctcaggccgtggcttcagagggtgcaagcctcaagctttggcagcttccacgtggtgttgagtctgtgagtacacagatgtcaagaattgaggtttgggaacctccacctagatttcagaagatgtatggaaatgcctggatgtccaagcagaggtctgctgcaagggcagggctcttgtggagaacccttctgctagtgtggaagggaaatgtgggattggagctcccacacagagtccctacttggacactgcctagtgaagctgtgagaagagggccaccatcctccggagcccagaatggtagatccactgacagcttacactgtccacttggaaaagctgcaaacactcaacaccagcccgtgaaagcatctgggagggaggcgaaagcatctaggagggaggctgtaacaggggctgaactgcccaagaccatgggaacccccgtcttgcatcagtgtgacctggatatgagacatgaagtcaaaggagatcattttggagctttaaggtttgcctgccctgctggatttcggacttgtatggccccggtagcccctttgttttggccaatttctcccatttgcaatggctgtatttacccaatgcctgtactcccatcgtatctaggaagtaactaatttgctttttattttacaatctttccagctcataggcagaagggatttgctttgtttcagatgagatgttggactgtgggcttttgagttaatggtgaaatgagttaagactttggggggactgttaggaaggcacgattggttttgaaatgtgaggacatgagattttggagggccaggagcaacatgatatggtttggctccgtccccagccaaatctcacgttgaattataactcccacaatccccacatgtcatgggaggaacccagtgggaggtgattgaattatggggatgggtctttcctgcacagtcctcatgatagtgaatgagtctcacaagatctgatggttttaaaaacaggagtttccctgcacaagttctcttctgttgtctgcctccatgtgagacatgcctttcaccttctgccatgattgtgaggcttccccagccacatggaactgtaagtccaataaacctctttcttttgtaaattgcccagtcttaggtatgtctttatcagcagcatgaaaacagactaatacaagtgggcagaactgaataacaaacagagaaagaggagtggggggtcctccaccatacagggattgtatcaacttctgaatcaaggtgaaggtaaactgcaacaggtcatagtccttagaccccaggactaagaagaaaataaaaaaactatgcttacaacactctagttctaggtaccagggtttttagtgctgggaaatgccagtgaaaacatatgaaaactttcaaaactaagcccaatcagtggctcaggggcaagagggttgatataagaacattttgtcatctgttttccaagagttagaacaagcgactagggggaaaaaccttggctgtgtcatattaagaatatcatggccaggcacagtagctcacacttgtaattttgggaggctgaggcaggtggatcacctgaggtcaggagttcaagaccagcctggccaacatggtgaaacctcatctgtactaaaaatacaaaaaattagccaggcctggaggcgggtgcctataatcctagctactcaggaggctgaggcaggagaattgcttgaacctgggaggaggaggttgcagtgagctgagatcatgccatttcactccaacctgggtgacagagagagactctgtctcaaaaaaaaaaaaaatctgctgcagtgcgccacttttcccttttcggacacctctctcacgagagagagggggctgctctcctctatcctttcttctgcctattaaactttccactccttagcacattccgtgtgtgtgtctgtgttgttaatcttctacgggcgagatgacgaatcccaggtatttaccccagacaacggtgctgcttcactatgacaggaaatgtcctctccatagggcatagaccaagtaaacgactttgtaactttccttcaatctcttcatttacatagagcgtacaccaagcaaccaatggaatcctctagatggtatttaaactcccaaaaattctgtaatggggcccttgagcctctatgctcaggaccgctcccacactatggagtgtactttcattttcaataaatttcttcattctttccttgccttgtgtgtgcattttgtccaattctttgtttaggatccaagaacctggacaccctccactggtaacaccagtaccgatgacaccctggagcgccctgccctgatcccatcctctctttcagaggcaatctgaattttgcactacaatttccttgattttccttacagtttcaccacatatgcaggtattgctgaccaacatacttttgatttaaaagtatatgttatcatataacatgtattcattatatggaatttctataaacatcatcaaataccatatgttttcctctgacttgcttttttccactcattgttacatttttgagctcacccatattgatccggaaagctaaagttcattcactttcactacaatataatattatttgtctgatattaatatagccacagcaacttactttcagttcattccctggtagaccattatccatcttttgacctactaaggttctatgtagtatgctggggcaaatcttgataagaacatacagctagatgtatttgttcacttttaaaatctgatatggcaatttttgtgttttaactgaggtatttaatgtgcttgctgttacgtttggggagaaaaatctgccatcttattttgtgctttctatttatttctttttctatttctctgtctttcccctcttctttcttgacttctttagacttgattgagtccccacttctagttcaccccacagataggaaattttcaaaacacagaattttaaatgtaatcaaaccataaaatgaaatggaaaaatagaaatatgttcagacacagaaggactcagaaaatgtacttctcactcccaccccatcttaggaggtcacattcatatgtcacccagccaaatgagagaataagccaatgaaagaggatgtctagaaatctatataaccccaggaaacaataaagaaaagtttcagatggacagaagcacagcaagtctagagaagaatccatccaaattggagcaagagggtagaggtttcagggagaagctacgcagggaaaacaattccaaagatttgcaactagcattgaggaaatgattaagataggtaaggtaaggaaacaaagaaaaaggatctgaaacttcagaagaaaaaaaatgtcctgacctcatcagttaactttattgttatttattattaatcttattttatgagctgtgaagcaacttgcccaaggttaatgcttcctcacagggctattgttgaagattgagttagttaacagagtaattagaagagtgtcccacaattaataaaggctacataagtatttatcaaatagatgatgggaaatgaagcttgggtctgcccttagcaatagtcacatagtcacaataatgttactattgctttttaaactaaattcagccatgaggcaaagtacaaatgacttaattatggttacagaatgagatgtaaagttttatcaactttgaaaatatataaaagctttgaatatataatataaaatatcaaaaacacagatgacagaagttgggcagtagaaatgagggtaagagaaggaagggaaggtaaggacactgctcacctcctaaaatgggaagccaagggatactgtctaaagtagaagaagccaaggataaaggtccagtcaggtatttaaagttataagggaattgggtggagtgcagtgactcacgtctgcaatcccagcactttgggaggccgaggtgggcagatcacttgaggtcaggagtctgagaccagcctggctaacatggtgaaaccccgtctctactaaaaatacaaaaactagccaggtgtggtggcgcacgcctgtagtcccagctactcaggaggctgaggcaggagaattgcttgaactcaggaggtagaggttgcagtgagccgagattgcgccactgcactccagcctgggtgacaaagcgagattccatctcaaaaataaataaataataaaataaaatgaagctataagggaattaaagtaggaattaaaaatagtgctgtagttttattgggggggagaagggtgactctgtaaatgagcttaatcttcctctatcatgcagaaagtcatagttaacatctaaaattattaaccaagacataagagtataatatgttattcagagacatgaagataaatcccagaaaaactaaaaaaagaaacagaaacaattaaaagaattaaaagtagttccctctatgtagcaggattgagaccatggaaaagtaggggaggagactgctgcttttcattataaatccttctttattatttgaaaatatttaatcatttatatgtactactttaaagaaaaatgaaaactttttttttctgagatatggtcttgctctgtcttccagactggagtgcagtagcatgattttagctcactgcaacctctgcctcctgggctcaggtgatcctcctaccttagcctcctgagtagctaggatcacaggcgtgcaccactatgcctggctaatttattattattattatttgtagatatgaggtgtccctatgttgcccaggctggtcttaaactcctgaactcaagcaatcctcccacctaggcctcccaaaatgttgggattacaggcgttagccacaacacctggcctaaatcttgcaatttttaagtttttaagtagttactataatttaccatcattcgtatcctaaattgttttcaactttttttttttttttttttttttttttttgagatggagtctcactctgtcgcccagactagagtacagtggcgcaatctcggctcactgcaagctccgcctcccgggttcacgcggttctcctgcctcagccttctgagtagctgggactacagacgcctgccaccacacccggctaatttttttgtatttttagtagagacggggtttcaccgtgttagccaggatggtctcgatctcctgaccttgtgatccgcccgcccgcagccacccaaagtgctgggattacaggtgtgagccaccgcgcccggccttgttttcaactttaaataaagattaaatttctccatgatattgtagagaaaaggctagaatgttgaacaaatatttttaagttttaaggtgtatcaaattactagcttccgtagggagcctttaagccttggtctctcgttgttttaattatactgttctttttttttttttttttttttttttttttttttttttttgagacggagtctcgctctgtcacccaggctggagtgcagtggcgggatctcggctcactgcaagctccgcctcccgggttcacgccattctcctgcctcagcctcccaagtagctgggactacaggcgcccgccaccacgcccgaccaattttttgtatttttagtagagacggggtttcaccgttttagccgggatggtctcgatctcctgacctcgtgatccgcccgcctcggcctcccaaagtgctgggattacaggcgtgagtatactgttcttttttttcccttggtcaagaattggcaggtttgcacaataattaaagttttcaaaagcctctggaaacttccatcatagttacattttctcatatacaccttggtttcctttcctggttggggtgggaaggaaggtaagaagaatcaggaggcttccttgatattgaagaggaggttcaagatctctggagggtccagggtccaataacagaaccgagtccaacagtatcagtggtatgatgtcagtcaagttattaacacatagctaagatcccaggttcctactaagccaatggacaaggaccaagggacactctggggcaactgcacctgcatcacacttttcccaagtgccagacaagcccgtgctgtcacaggctgaatctttgcagtttctgctccagcctatagataggaatcctgtcattttaagtgactgattacccagggccttaacactactccctatttcagaaaagccagtcagcaattaaaaagaacaaacacaggtagtcccaaccctgttccagttcctggttccagtcatttataagggctatttatatctctgcccttagacttttgtttctttctatcttgttttgcttaggtgggagcggggagggagtacctaagtgggtttctatttcatagcctctccctaacaagagttcccagatttcatgaagaaagcacagcctatctacaactccacagctattgagtacggagacagtgtcccccatcaccaaaatgaagtcttccatctggctgcagaaggtggtcaggaatttaatctgtagttaggggctccacaataaagatatatctacaattttaatttaaattgtagataaattgtttatctacaatttaatctacaattgtagatatatctacaatttaatctacaattgtagatatatctacaattttataacaaatgtcataacttcttccataacacatactcctaatcataaaaccatattctcagttgtaaccttctgggaagatacttccatcagacataaagtgactcaggttgctggcatgagcttgaattgcaccagaatctaaccacagaaataggtttccacagacgttactattgcaatacatatcttctcctttaccaagtgagttgtaaatgatatggtcttagactgggcataacggctcatgcctgtaatcccggcactttgtgaggccaagatggaaggactgcttgagcctgggaggtcaaggttgcagtgagccatgatggcgccactgcactccagcctgggcaacagagtgagaccttgtctcaaaaaatgaaaggaaaagggaaagggaaagagaaagggaacgggaaaggggaagggaaggggaaggggcagggaaggggaaggggaaggggaagggaagagaaagggaaaggggaaggaaggaggaagcaaggagagagaaagtacaaaagagcatataaatatagcagccacttgccatattggcatcaaccctagagtaagaaaaggcagattttgtgacagtgtaaaagtgctttatgtaaatatagaccacagattagtgatgacagaaaaagaatatatcataatttctttacatttagatttctttggatttagatttggaatttagatttagaatggataatagtatggagtgaattttttcccttttcaattttctttttttcttttttctttttttttttgagacagagtctcgctctgtcactcaggctggagtgcagtggtgcgatcttggctcactgcaagctccgcctcccagcttcatgccattctcctgcctcagcctcccgagtagctgggactacaggcgcccgccaccacgcctagctaacttgttgtatttttagtagagacgggtttcaccatgttagccaggatggtcttgatctcctgacctcatgatccacccgcctcagcctcccagagtgctaggattaggcgtgagccaccgcgcccggccttcccttttcaattttcatgtcatttttttgtttggtttgagacggagtctcgcagtgtcgcccaggatggagcgcaatggcatgatatcatctcactgcagcctccacctcccgggttcaagaaattctcctgcctcagcctcctgagtagttgggattacaggcacacaccatcatgactggctaatttttgtatttttagtagagacaggatttcaccatgttggccaggctggtctcgatctcctgacctcgtgatctgcctacctcggcctcccaaagtgctgggattacagtcgtgagccaccatgcccagcctggaaaacagtattttgactggatattgtgaggctaaagatgaaaggaactgtacacaaactctgtaatctaattagtaaatttgcttctcatagaggtatgcattagcaattctgaaatcattttaagattggacagaaaatgatgatgatgatgaagatagatggatagataggatagagatgtatgtatgcagcatgtatgtatacatattcacgtatatatgtaaatatacatacttatcctagctgtactgaagtggcctaaaagcactgataacccaacagcaatgagcccagctagcaactaaatcttggtttctaaataccattctccagcacaaagaaccaaggctccttgaggaagaggttaattccagggctggggaagggaaaatacaagatgaacctggagtatcttgtgatgccagagagcaagaaagtgctcataatggatgagagcatgtgaaaaggacacaggagccaagccaaaggacctctcaatagccaaagtgggaacactttgagcaataaaataaataatgatagtattagattataatccagagaataaaataagtaaataaataatctaatgggtaaataaatgggaaaaaaggaagaacttttccttgcagaataattttaattaatgaatgaacaaaaaatgaggaaatagaaaattacttttgcaagcaaaatctaccaaggaaactaaaattagtaagtgaaagtgacaggagaaacaggatatttgcatagtttcaagtagctcatccaagatgtttattgattacaaaggggaaaatagtaactttatagtggagacagacaaaccccaccttagccaagtgatcaaggttaacatcaccagtaataaaacacattgacatcatatatgatctgatatgattactgagaaaatggcagagaaacccaaattgagatatattctacaaaatagcagaccagtattcttcaaatatgtcagtcatgaaagataaggaaaaactgaggaacttctccagatggaggagactaaggagagatgacaacaaatgtaatgtggaatcctggattagatactcaaaccaatagagaacattcatggaaaaactcttgagattcaaataatgtcattagtcattagtatattactgtaccaatgttaatttcccatttttaatcattgtattatggttataggagatgttaattttaggggaagctaggtgaaggacatatgggagctttagcctattcttgcaacttttctgtccaaaattgtttcaaacttaaaaaattatctcatgtttctaacatatatctaacatatatatccttcaatcaatagccagttaccacaaagatcttgtgggtagaatgctaaaaaacgatcttccctcaatgaggtgttttttgttttttttcttttgaaacaggatcttgctctgttacccaggctggagtgcagtgcggcaatctcactgcaacctcagcttccgggttcaagccattctcctgcctcagccttccaagtagctaggattacatgagtgtgccaccactccaggctaatttttgtatttttagtagaaacggggtttccatgctggccaggctggtgtcaaactcctgacctcaagagatccgcccacctcggcctcccaaagtgccggaattacaggtgtgagccaccgcgcccagctcctcaatgacgtttttattgcttactcacaagttcaaatcagataagaaacaatgtttgctgatctcttaaagagcaactttccattgctaggacagtataatttttttttttttttttttttttttgagacggagtctcactctgtcgcccaggctggagtgcagtggtgtgatctcggcacactgcaagcttcgccttccaggtccacatcattctcctgcctcagcctcccaagtagcgctgggaactacaggctcccgccaccacacctggctaatttttttttttttttttttgtatttttagtagagacagggtttcaccgtgttagccaggatggtcttgatctcctgacctcgtgatccgcccgccttggcctcccaaagtgctgggattacaggcgtgagccagcgcgcccaaccaggacggtgtaattttaagtatattattgctcaagagtttttcagctgtaaagtgatgggaatgaaattcaacttgaactttttttttttttttttgagatggagtcttgctctgtcacccaggctggagtgcagtggcgcgatctcggctcactgcaacctccgtctcccgggttcaagcgattctcctgcctcagcctcccgagtagctgggactacaggcaagcgccaccaagcccagctaatttttgtattttcagtagagacggggtttcaccacgttggccaggatgatgccgatctcttgacctcgtgatccgcctgcctccgccttccaaagtgctgggaatacagatgtgagccactgcgcccggccttatttaaccaaagtaaaaaagggccaccgcaggggaggtagaagttggtaatttttggctcgtgtagctgtgaggatttgcggggcaggtcatagaatctaagggagagctaccagaagccagggccttgaactcccttcccctcccctcctccccccacacccctcccctcccctctgccccctcccctcccctgccctcctctcctctcctctgcctgcacattggaatcattctcccctgctatagtaagacttcctccacgtagccggggaagatggccaccagcaaggcaatgcactcaatccaagtaaacaattccaacagaaaagagagagcagtttccttccagccacttctttttttcgtttgtttgttttttttgttgttgttgagtcagagttttgctctgtggcccaggctgaagtgcagtggcgtgatctcggctcactgtaagctctgcctcctgggctcatgccattctcctgcatcagcctcccgagtagctgggattacaggcatccgcctccacacccggctaagttttgtattttatagcatttttcagaaagaattttaattggccctgctaaggtcacacgctcaatcttttggtccaatcagtttccaaggatatagagctctatgatgggctaagcctgggtaatactgctgctggcattgaaatgcacctcccagattttcctcaagaaaagactggctgcccagctgcaagcagtgtggttagctggtgcccaattcttcttcctcttttcacaaatgttactcaataatctttcacaagcgtaaccaacctgggacccataccctgcctggggctgcaccacaccaccagaaccatatataatgtgggtgaacaggcttttcaaagaaatgaatgatttgtgtttaataattatttataaacaattgtaagacaggttgttttgaccaatgggatattaacaatcattgtaatgataactgaaaccagaataaatttttggtatttagatttttattttatttttattttttagcgatggggtcttgctgtgtcacccagactcaagtgcagcggcatgatcataaaaagagcttaatttacatacctacttttgttgcagagaactatgacagagtgatcaaataaaaggctttcagaaataaaaatacctatattaggataatattctgtgggaaaatcagaagtgaaatggaagttggcaaggaacaggaataatgtaaaatttctgactattaaagagcttgtttgagcattttttaaacaggtgtgtataggttgtaaattgccatggagcaatctggagctgaagagctggcacaggggaccagccaccaccaaaacaggtgtgtggactcttctaggattctcagaaatactttcagaatgaatgagagcttaatcaatggctggacatcttgcatttgggatctcaaattatcattattggtattgaggagaacagagacccctatgaacacttaagaataagcagacatggaggttccattatgtacataatatatgtattactacttttcagttgaaaataagtgccatattaattaattaaaaatacatttccttaatccattcaagaatcccttgaagccacctcctgcctaaaggtctgataaatacatgtgctatggtttgaatgtttgtgtccttgtaaaattcacattgaaaattaatccctattgtgatggtattaagtggtagggctttgggggaagtgattgagtcataagggctgcctggctctcccaccttttctgccatgtgaggacacagctttcatcccttttgcccccttcaccatgtgaggacacagcaagaatatgcaagccctcaccagatacttttaataagtatcccaagtgattttgttatatagtcaagattaaaaaccactgaagatcccttctaacccagaggttacttaattctaactgtagctggtgccttccttatggcaatcaaaggtatttgaaaaaatcattccagtttagtatataacaaaagtgacaagtcaggaaaatatgaactttgtggtaagcagcattgttataactgtatactcttaagataaagataaaattggatctgtttctcatattgtacatgagaataaattcaaattagatgagagatttaaatgtaaataaacaatataagatctagaagaaaataggagtaaatacctttataacctaaaagtgaggtaaattttcctaaaactcacatttcaaaagaaataagagaaaagattaaccatttttactatctaaaaccttaattttaaaaatgtatagcaaaaaaaaatgagcaaagtatcaatttgaaatcactttgtattttattcttaaaatgtgtatttgtttctttgctctaacccccgaaaaagcccagtgacaatgagcacctctagtatctaaattatggtctctaactaacatttcccactaaaagaagccaagactccttgggaaaattgtcaatgtcaggtctgagtcagaaaatatataaattgatctgggaacatcttgttgtacaagaaagcaagcaatatggtttaaaagaacaattttagcatcaataagaataactgcaatgggctggttgcagtggctcaccattatcccagcactttgggaggccgaggcgggcagatcacttaaggtcaggagttcaagaccagcccagccaacatggtaaaaccccatcttgacaaaaataccaaaattagccaggcatggtggcacatgcctgtaatcccagctactccagaggctgaggcatgagaattgcttgaacccaggaggcagaggttgcagtgagccaggatcgcaccattgcactccagcctgggcgacaaggagagacttcatcttaaaaaataaaacaatataactgcaacggatcaaaatgcaccaaatatgtttaaattcatgagttcataatgaagctaaaaaaaactttccgtcattggatacttttgaaaaatgctaggaaacaactcattattttgaaaactggtgaataaagggaataaataaaatatatatttgcctttttataggaattatacctcaaggtaaccaaatggttgatgaggagaattttgtttttttttagaatcatttcagctaataaatgaaaaaggaatatgtgttagttcttgtccgttgagaagcagatgtccagactggatgaaatgcaaaaggattttacttgaggaaatgattgtgtaaaaggaaatagagaaggagcaagagaaggctgggaaggctgtcagactgtggtgcaaaagggtgaagatgaagagaaggctggttaaagcatcctaaactgctctgcagtataaggaggtttgccaaagccatcgagccaaagttaacttacaaaggcatcccatgtctcccagaaacaggtctaccgtaatatccccattgcactcagttattgctggaaggaatggcctcagtacaaatgcagcgctgtatttcaaagcatagcagctggggcctgacttcacttacactccatgcagtaggaggtctcctaggcatattctcacggccatctcagcacgatataattagaatatgactattttgcaacctctactgaaggaatggatccagcaatgatcatcaaccaacattagaaaaagaaaatcaactaaacatatgtgtcttcttaggacagtatatggtaatacctatgaagtattcttgccaaaaaaattttacctgaatctgatcaagcttctagggctaattaccactatacaggaaatacaagggaacagaggaaggggttaaatgacataacgggggtaaaatctgccaatctagaccataggaaacactggagacaaacaaccaggtttattccatatataaattgtgtgcgttgaggccgatggttgtaagaagtagggaaagggagaggacacctatagattttaaaagacttaagacatatgtcagcaaatggcaatgtatacaccttatttagatcttgattcaaacaaaaacaaatgtttaatattatgagacaatcaggaaaatctgaacactgaatagttgataatataaaaaactcggggggctaggtctgatatatttggtttgtagttttataaatggaggttttgttagatatacatactaaaatacttagtgatatttatcttctaaagatgtatactaaaatattaactgatgaaataatatgatgtccagaaactgcatcaaaataatccagggagaaagaactaataatctggtgtggcaatagaccgaataatattaaccatagttgaaaattgttgaagttggatgatgggtccatacagttctctcaacttaattctaggttaaatacaatgattgtaacaatatgcgagagccaagaagaggtgtatgaaaccttctctacatcatggtctatgaaccacaggagttcagtagggcagccatcctgttgtccacctttttcccaagcaggagcacccagttccaagggagctctcctggctgaagcaaagaatgcacaccagcctgggcaacatggagaaagctgtctctgtaaaaaaaaaaatacaaaaattagttgggcatggtggtgcattcctgtagtcccagctacttgagaggttaaggtaggagaatcacttgagcccaggaggttgtggctgcagtgagtcgtggtgcaccgctgcagtccagcctaagtgatagagcgagaccctgtctccaaaagaaaaaaaaagaaagaatgcacaaaatgatctatacctacatgcaaggatataagtgaatcttcgcaatatgtgttagatcttccttgcaaattatatgaagtgtctactaagtggaagagaaataaaatgaataagaaaataaggtcaggcgcagtggcacacaccagtaatcccagcactttgggaagctgaggcgtgtggaccacttgaggtctggagttcaagaccagcctggccaacatgttgaaaccccatctctaccaaaaaataccagaaaaaaattagccaggcatggtggcacatgcctgtagtccagctactcagaaggctgaggaaggagaatcacttgaacccaggaggcagaggttgcagtgagccaagatcacaccactgcactccagtccaggcaacagagtgagaatctgtctcagaaaaaaaaaaaaaaaaaagaagaagaagaaggaaagggaaggaaagggaaagggaagggaaggaaaatgatccccctgcttgagcctcccaaagtgctgggattacatcctcttaaagtgctggcttaaccccagcactttggcaggccaaagcagggaactgcttgagcccaggagttcaagactagcccaggcaacatagggagactccaatctctaaaataaatttaaaaattagccaggcgtggtggtgtggtcccagctactcgggaggctgaagtgggaggatcacttgagcctgggaggttgaagctgcagagagctatgatggcaccactgcactccagcctaggtgacagagtgaagttaagtagtgcccctgcctaaaaaaaaaaagccagaattatgtgatgaagggtaacgaggacctacttcaagtaggactgaaggaaaggtgtggagacctgaacaagagttcagataagatagataagagttctagataagaacattctagacagaggaaaccagaagtgcaaggtcctaaggaagagtgagctttgtttcgggaacagaaggaaggccagtgcaaatggagaatggccatgatggaatttggattttattccaagtgcaaggggaagcaattggagtggttttgttggagttacaaatttgatttacacatttgaaagatgatcctggctgctatattggagggcaggaatgcaggcagggaaacaaacaaggaagcttttgcaacactccagatgagagttatagaggatgacggtggagatggagaaaagcagatggattagttacacatgtcagaggtaaaaccaacagctcttgccagttgaatggatgggaagtgagggatgacttttagacttttggcttaatcattgagtagattgtggtgccaattactgaggtggagaaggttagaaggtgtgtgtgacagaggatgagaactgaaggtttcaatggggacatgctaaccttgaggtcctaatttgaatatttacatattcaaagatatgtaaagttggcagtttttctagaatggtccctatttcaagtctatcccattatctgcataagtcaagattttgggtcagcaaagtagttacctgtctcttctgctgagtcctgcctcttcatcttggctcattctattccacctctgcatcatcaccagttcaaaatctatccttcaaagttagcttcatatagaaaaaaataatttactttcccaacccacagggaatcttaccagtagttaattcctattatattgtattctgtcctcattttctttctgctggtatggcttcacaaattttctttgatcttttttttttttttttgagacagcgtcttgctgtgtcacccaggcttgaacacagtggcacaaacacagctcactgcagccttgagctcctgagctcaagtgatcctcctgcctcagcctcccacgtagctgggaccacaagtgtgcaccaccatgctcagctactatattttttgtagaaacaggtctcaccatcttgcccaggctggtctcagactcctgggctcaagtgatccacccacctcggcctcccaaaatgctgggattacaggcatgagccactgcatgtggctctgttcacgttttctagttgtctgcaatatatcaccttgtgttgccctccaattgctcccagcataccttaaaaagatggactgaacatataagatccattattccccattctgggtaacataatggtaaagatggacatggccttgatgtaatttgacctctttccttcatgcattcattcaggaccaggaccagggtgaggcaaacaaggtccctacgggcacagaatttaagaaggcactcactcttgatgaaactggaggaccaaaatgtaagtattttttttgttcttctatatactatgtggccaatattgcctttctaaaagatagtaccaatttataatgccaccaaaaatcaaccagtctactatcagtttgtaaaactttgtcaaggctgggtggtgtttttttttttttttttttttgagacagagtcttgctctatcacccaggctggagtgcagtggtgcaatctcgactcactgcaacctccaccttccgggttcaagcaagtctcctgcctcagctccccgagtagctgggactacaggtgcccacgaccatgcctggctaatttttttgtatttttagtagagacggggtttcactatattggccaggctggtctcgaactcctgactttgtgatctgcccacctcggcttcccaaagtgctgggattacaggcgtgagccactgcgcccggcctggatgttatttttttattttttattttatttatttatgtatttattttgagacagagtctcgctctgttgcccatgctggagtgcaatggcgcaatctcggttcactgcaacctctgtctaacaggttcaagcaattctcctgcctcagcctcccaagtagccgggattacgggcatgtgccaccaagcccggctaattttgtatttttagtagagacgaggtttctccatgttggtcaggctggtctcgaactcccgacctcaggtcatccgcccgcctcggcctcccaaagtgctcggattacaggcatgagccaccccgcccagacatattttttatttttttgagacggaggtttgctcttgttgcccaggctggagtgcaatggcgtgatctcggctcaccacaacctctgcctcccgggttcaagcaattctcctgcctcagcctactgagtagctgggattataggcatgcgccaccacgcccagctaattttgtatttttagtagagacgaggtttctccatgttggtcaggctggtctcaaactcccgacctcaggtgatctgcctgcctcggcctcctaaagtgctggaattacaggcatgagtgaccgtgcccggccaagcttaccgatttttaagatgtactttccccctttaatacaataaataactagtacatatttgttgacatctttttgatttttcaattttttaattttttattttatttatttatttgaaaaaaggagatgagatctcactatgttgcacaggctggtctcaaactcctgggctcaagtgatcctcccgccttggcctcccaaagtgctgggattacaggtgtgagttaccacacctggccatgttgccatctttttattgtggagtttatacatagtatttggaagaaaataggctatctggaattccacatgtctctttttctttctccttcttcagatttctttgtttctttgtttcccctaatattgattatgtgttaggcactgttttaaatgttttgcatgtattaattttttgaattttccctacaatcctgtggggtaggtgcaattattacgctcatttgacaaggaacctgaggcatagaaatgttaagtggctagcagatggcagctaggaattgggactgaaaagggactctaagcacttagagtctgccataatgccacacattctcactgtacaacctcacacaatagccttgttctagtgggaaagatttcccatccgcaaaaacttcagagtgaatgacaggaaagctggccactctcatttcttaatttttttttttttttagagacacggtcttgctgtcactccggctggagtgtggtgacacaacacagctcactgtaacctcaaattcttgggctcaggcaatcctcctgcctcagccttccaagtagcggggactacaagcctacgggcacttaccaccatgtctggctaattttttaattttttgtttttgtttttgtttttttttagagacaaggtctcactgtgttggccaggcttgtcttgaactctgaccttaagcagtcctccgcctgggcctcccactgtgccggcccaccctcatttctgaaaggttttgttaaacaaagtttatgagaggccattgttatggactagcctcctgctctaggccccagaaaatcagaccaaaccagaatgaagtcgcttgtgctaagtgacatataatcaaactgaactttgaaatggaccagttttccaaaaaacaggagatttcagtcaacctcagtcagtgtagtaaggaagtcctctctgttttagtcctataaggaaagtaactttgaaacaaccaatctatctttttttctctgtttccgctttcttcatactcaccaggacactcattctattttatagaatgatgtgttgcttgattctagaattgcaaataaaaggcaattacatcttctaaactaaatttgttgtaattttgtcttttgatagtttaaactatgggatcagaaattcaaagactatgaataaaaatttcaaaagaaagaaatagtaataccaccaataagaagaataattaaaaaggtacaaagaaattggatgcaacattgtaaaaagagccatagtttggagctgagctgacatgagctaaaatcctaggtgagtaacttgttagctatgtggcctctgaaagtcagctcaagaatctgagcttgtttcctcacctctaaaattgaaaaaataaggcctaactatcaaagtcattaacaagtcattgataatgcttggcctattttaatgttcagtatctgtaagttgataccattaaaggatgcttgagatgccaactactatataatctgaaacaataatgatcttttttttccccacaaagataacaaaaaacaaacacaaaaaaacaacagtaagctctgccagacatgtaaaaccaatcaaactatataatgaattaaatcctttccccattaaaaagacgtatcagtgtacctaacacaatataggaaaagaaacacaccttatttggcaagagatatattcattctccagataagagaaacacacattgaaaccacttctgctggattactctggccaataagagcgtctgaaactgttctatgtactatgccctgcgatagaaacacagttacctctcccctttcacgtagttttcatttgtggtgagattctctcccaggccacaagacatttcctgctcggaaccttgtttactaattgtaagtactttacaagtaagaacttgttttaaaaacttagcattcaaaaaaaaaaagctttctttaaaagttatttgattttcttgtttttttcttagcatgttatattttgagtttcagctaaaagactaaggttttcttatctaattgctttaaatttatacatttagtcaaattcaacaatttcttgctaagcattttgccaaatgccaggcttttcaaagtagtgtaagatcccagccttgaatcctcatcaattgctgctttctgcagcaaacacatattatacattgtatttagtaacatgatcattaatttcactctttatttcaatatgtatgcatgttgacttatgccggtctaatttctttctgctttacaaatattctattttatccattcaaagtatttagaaacaagatatggaattttgtagatttagctaatgaattataagaattcttgaattctcactatgaaagtaagaaaaacagactagaattcttcaaaattaaattctggtgcttcatttatatgtataaagagagatggagagattatgaaatggaaatgtttcaatcaaagcaaaaaaatgaaatttaacatcaataaacagtagaagagaaaaatctcaataatatgtctagtatctggattaatcaatattaataatatgtattaatattactataattaatatcatgtattatattaatattaatgtattttattaagatagtgggctgtcctcaggagtgaagtgctcatagaaaggagagacaaatacaagattgattcttaactaatagataaaattaaggtgtttaaaatatgagccaaatactgcaagatttcctgacattgagaccattccacagaacttcctaaagaaaggtattctagtctcattctccaaagcttgcccaccaagattcccatttcactacctcctgcccccatttttcctgcattttccaaggtggcccctgccaacttttttttaatcactctctctgctcctgtggggttaaagatggcatggaacaaaacagctgtgtggtcacaccacaacgggcagaactgctggccacagataggaaacctcaggcatctccttagcccttaccaaatccagcccaacacgtttacacaccctggcactcaataaaatatttgctgaattaaattggatctgtagttattagtaacagaagaaaaataaggccactggtcgtgggttacaaaatgtgctctgcaaggccactggcattagaatcttgtgaagtgcccaggatactgcacaggcccgcacctgaagggagaggagctagtttggaatgtgctcccgggaatgcgagagggtctagcatgggcttcatcgcatggaggaaggtgtaccgtttttcgaattctcaccgaagcagctacgtgctcaccaagccgtgtctgtgagaagggccacgtttttctagttcataggacaaaagcctatggcataagggcagcagccctgcgggtgcacgttacagacttttagaccctagctcattctatctaaaccacaatctctgaacagtgtgtagaattctacattgtacagattcctcaaccctagctcattctatctaagtcacaatctctgagcagtgtctagaaatctacacgttaaagagcagtccaagtggttttactaatagtaagctttgaggaccactgaactaaggagacaagctggtacctaaggtcctaggaactctagattttcaaggacgttttctctccacttattgctgaccttttaccttgaatggctaaggctaaagacttcatggctgaagcaaagagaattgtggttgtttgaacaagcaacaattttacatttgtttctgttttacatttgttgcaacttaaaagataccttgaatttttaaatgatcacagaggcgcgtacaaatgagtgtgtttgctttctcatctgttttataactttcaagaaggtatttctttgaataagatatctcacgggagaagttattagaccctttttagaatcagctagaagtgacagatggaagtcctggatagcagttccctttaggactactcttctacgcagggataagccgagtagacttctccaccaatataggtaatctgtgctagaaaggaacttacaatagcatcagaaacctcctggggccccccattctgctccagttcctagtgctaatattcacagaagcacctgggtccctgcaatctcccacattcaaaagaggaagtcaaaagtacaaaagtagtgaaggaaacagaaacatacaatgttgactgttgggctaaagactgttgaggctactacatggaggaagtaatgttcacacaaactaactggcagttagcatatggatatttgagatacagctgatacatatatatatatatatatacatatatatatatacatatatatatatataaatttttttttttttgagacggagtctcgctctgtcatccaggctggaatgcaatggcacgatcttggctcaccacaacctccacctcctgggttcaagcgattctcctgcctcagcctcccgaatagctgggattacaggcatacactaccacacccagctaattttgtatttttagtagagacagggtttctccatgttgttcaggttggtctcgaactcccgacctcagcctcccaaagtgctgggattacaggcgtaagccaccacacccagccgatacagctgcttactatagaatatagagatggccactgagtggatttcaaaggcactcagaaaatgttcaggactcaaactgctatgaagtctaacattagccaatttgaatacaaaaacacatatgccatacactaagtaaatacagtcaggtaaaggaaaaacaattacataattgcagggtggtttttattctgaaatcttcagattgctgttattatattaaaaaacagaatataggcttcttgaaaaaataagggtgttaaatgaacatgtttttcctctgaaagagttgtaggatcatctttatttattgaataccagtttcatgccaagcattggctaagggccaagagggaaaaaaatacaaacagctatagtatcatttgtatgacttgccccctcctttttttttatttttttattttttttttggagataagagtctcgctctgtcaccgaggatccacctgccttggcctcccaaagtgctaggattacaggcgttagccaccgtgcctggcctggtatgaccccttaaaattttttttctagtcactggatttgctttttgtttctgaaaaggatatttcttgttttgcttataaaagaaataaatgctaattataaaaaaaattatcggccatgggtggtggcttacacctgtaattccagtgttttgggaggccaaggcaggaagatcacttgaggccaggagctcaaggtcagcctgggcaacatagtgagacccccatctctacagaaaacgaaaacaaattagccaggcatggtggtgtgcacctgtaatctcggctactcaggaggctgaggtggggggatcacttgagctcaggagttccaggctgcagtgaattatgatcgtgccattcattgcactcctgcctggacaacaaagagaccttatcacaaaacaacaacaacaaaaagtctatcagccaatcacctagggatagccacttgacattacggataattagcctttcatattttttctggtatttgataaccaagatgaaatgcagaagaaatttgaatacatattctctagcatttcctgtaatgcttcttcctccaggatttcaaatgtgggaagccatcacccaaaaatatggtttcgaccatgttagtactggagttgggatttagggaagatctggtccccacctgtggaggtctgcagagtcaggtgaaacattagccttgtttgcgtttccagggctgggctctcgccactgtttgctatgcaccatctggagcctgcatcacgcatggcctcagccagcccggaagcggagagcgtggtggcgggggcgctagtgagctcctcctgtgtaccaggtcccgagctaaggttttgagacacctcagtgaacttggcccacaaaatcccctgcctttgtggagcttaccctcagtgttggggatttgggacttacttttcccaaagccaagctaattattgtaaaaggggtgagtgacgaaaacggaatcattgcaaggtccttacctcttatttcatgagattggcggcatgagtgtgtctagagagctgtggttgcttactcttacacgtgggcgtgtaccccaagactagaatccagggtccatctaataagcattcaaatcagcgggcgggggagggggtgggtgatagtttcttgtcttactttccaatcccagcgttgctcagcccataccatctgataaaaactttttacaatttagaaatgcccggtgagcctgggcgcccggagcgacagagcggcgggtgcccgggaggaagcggcgccagccctgcccagctttgcggctcctggcgcctgccgctggggctgggctccgagaccgcgcgcccgctgcccggttcacgccgagtccccagcggcgcgccgccccggcgaatggtcccccgagggcagccatccgcagacgcagttccctgattgccccagcaaaaatgggcggtctccttgggatagattctgcgcgggctgctcttaagaatttaccggcaggcaggtctggtcccagcagaggagacccaggggtcccagagctgggctggcgggaggcgtaatccggcggggtgagggttgatcgaagagccccgcgcgcagctgccgctcacagccccttcccgagtgcagagcgggcagagaaggtaagaagcccacccacccactccccgcctcctgaagcccgtgcttcagacctgtccctgcaactggggaagagccaggcgggctctccgcctcctcgatcctcctccctggaagaggcccgaaggcagcggccgccagacacacgttcgcctagtccgtcacccgacggctctgcccctcaacaggggctcctccaccgccacgtacacatccgcggctcatgcacgccctgaatgatcggctcagccggaccccctggttttttgttcacttactggaaccttcttttgcagaaaatcttgtttgctgtgggatccacagatgggtccgcctccttcttttagtgtaaaaaagcagtgaacggctattatggtacatttttaaaaaaatcaaacagaagccaaaaccactttaatgtctatagaaggacacgtctaatacatttaaaataagcttcagctgttctgaatacagttcatggtatttttatttaaagacaaattctttagaatgagcctgtaaggtgggtaggtcagaaaccccattttacagtttaacaagtggacatttaaacggctagttaaatgatgagtctaagatcacggtttcagaaactaagacttgggcaaagctgctctcactccgaatctaattcatgttccatgaccctacactgcctctcatgatgtagagaaatgaggagtaaccttaccaaatgtacttcttaataaactgcccctaccacacagcagggtccgtcaggccagcgctgacacaggtttgcaggctcccagtaaatatgaagtgaaggacaagtcaggaagtgggaagactggaaaggattgctcatcggaaatcagtccaaaacaaaaaagaataaattaggaacaagaaggggggatatacacaaaagtttaggatgatgccattttagagaatgctattttctataattcactactgtcggccatgatcacaggttgctcgtttgtttcgcagcctgtgtgaataccaggtacctgtctaaaaacagtacacgagcaacactcttcagctcccttaccccacgagaagcaactgttcaccttcccagttccgtgaattctgtggtttttgttttggggggttttgttgaggtggagtctcactctgtcgcccaggctggggtgcagaagtatgacctcggcttaatgcaacctccaccttcccggttcaagcgattctcctgcctcggcctcccgagtagctggagttacaggcacgcgccaccaagcctggctaattttttgcatttttagtagaggcggggtttcgccatactggccaggctggtctcgaattcctgacctcaaatgatccgtcggcctcggcctcccaaagtgccgggattacagacctgagtcaccgcgcccggcccagttcggtgaattccttcccctcacccccagggtctctatcttgtgaagggtggagatagaaattctgttcttcaaacagagcaacttcctctacactgcctcagcatcctgcccctaaagtgggcctttaaagagcaacctcgagatttcttttatatatatatatatattttattatactttaagttctagggtacatgtgcacaacgtgcaggtttgttacatatgtatacatgtgccatgttggtgtgctgcacccattaactcgtcatttacattaggtatatctcctaatgctatccctctcccctccccccaccccacaacagagatttctaacaccactctgccttttcagtccactgcttttaaggccctgcactgaaaatgcaagctcaggcgccggtggtcgttgtgacccaacctggagtcggtcccggtccggccccccagaactccaactggcagacaggcatgtgtgactgtttcagcgactgcggagtctgtaagtgtgtggggaaagaacccccttatttgataccgaggtgaattaccaatgactcaatccttcccccattcctcccttattgtgtagaaaaagtttctaacttattacaagcactctgcatgtcaggcaatggtatgtttagcaaaaaaaaaaaaaaaaaaaaaaaaaaaaaaaaaaaaagcctccgtatggataacttaattttctccagcccttcaaagaacagtcttactcctaaaataagttctgggttaagataatagcaaaagagctgattgattctaacaacgagcaggtctggcctgactaaatagaacttacattaatttaaaaattccaagttgaacttgatttttttagaaagactgttcttgcaacatataaattaacctcattaatttatagttacattgtgtccagtacccaagggttagattcatggtttccatatgcgttcagagaaaactattttaatgtatatatttaggttttttacacacctgagaataaagaattctggaggcaattagcttgtcactggggaaaaaaaatctctgactgctttgtttttttttttgttttttttttttgtttgtttttgagacgaagtctcactcttgtccccctggctggagtgcaatggcacgatctccactcactgcaacctccgcctcccaggttcaagagattctcctgcctcagcctcctgagtagctgggattacaggcacccgtcaccacacctggctaatttttgtatttttagtagagacaaggtttcaccatgttggccaggctggtctcaaactcctgacctcaggtgatccgcctgcctgagcctcccaaagtactgggattacaagcgtgagccaccgcacccaggctgttttctttttataagatctccttaaaagatctcttacttagagatgtctctaaatgaacttggaggaaagaagtttggggtgtgatgggcgttgcagcgaggagcaaggtgcttagttctcaataatgaccaagaaataaacaaacccacctgcagaaaacttgctctgaagtctatttgcttgtcttggtccacatagtactctaaggcaagaaaataaaatacattatcctttaaagttgaaaatgactttgaatgagagttgaattgaaccttgtttttgttttttgttttttttgagacacagtctcactttgtcacccaggctagaatgtagtggtgcaatctcagctcactgcaattgtctgtctccctggttcaagtgattctcctaccttggcctccgagtagctggggttacaggcacgcacaaccacacccagccaatttttgtatttttagtagagatggggtttcatcgtgttgggcaggccggtctcaaactcctgacatcaagtgatctgcccacctcggccttccaaagtgctaggattacaggcataagccaccatacctggcctgaaattgaactttgaatgtgataagaattacaatcaggctgggcgtggtggctcacacctgtaatcccagcactttgggaggccaaggcgggcagatcacaaggtcaggagttcaagaccagcctggccaagatggtgaaaccccatctctactaaaaaatacaaaaattaaccgggcatggtggtgggtgcctgtagtcccagctacttgggaggctgaggcagaagaattgcttgaacctgagaggtagaggttgcagtgagctaagatcgcaccattgcactcgaggctgcatctcaaaaataaataaataaataagtaaataaaataaaataaaaataaaaaaagaattacacactcagtagcatagcaagggaaaattacctagggaatgaaacaattgtgttggttttttcactctcattgtctggggtgacgacttaagcttctcagggcaccagttcaacatctgcaaatcaaagtgagaattagactgcattggtgaaactctctaaagatgaacattttaaccctctcacccctagtattattattacccaattaaatgaatacacaagttccaatcaaagcttaattgcttaatagcaaattttcttaaatgtagatctgatcaaattattctcccctcttaaaatgtttcagtggttcctcataactctcatggcacactcttaacacttacagtttttcatcatctggtccccaacctgcctcaacccccagttaaatcctcatcccatcccagggctccagccatattgaatgaacactagcctttgccaggatatgccagattacctcgaagaggctcttttcctttttgtccacctttaaaacatctaatcatccttcaatatttcctgagcatttcctactcagggccttgtaggccccatttttctgggtgacctgttggtatttcaaacacgtttctgttggagaactttccctatgatctgccttcactactagacttgagccaggggcactgtcagtactgaggataatgtctggaaaatgaataagttttactgcatcaatgaacaaatgaatgaaggcagaactatgacaagaatgatatactttgcaaaggcgtggtcattcctgaaatgatttgcgggtggagcgagaaattgatgcaaagctgaatagaaacattgaagatggacttagcagcaggctttgcggccaaggccccatgactcggactgccatttgtgaaagcaagctaaactttcagctgtggcaggggcagagtggagtaatatgtacccctggtttcatgtgtctaggtctctgtggcacattttgtttcccgtgccttgggtgtcaagttgcagctgatatgaatgaatgctgtctgtgtggaacaagcgtcgcaatgaggactctctacaggacccgatatggcatccctgtgagtctcttaccataccatctcactcaaatatgcaccccattcaaaataattattataaacatggagatcatttgatgtatacatcttctgaaattgattgataagagttccctagcatgtgcaatcttgcattcagttgtagcaacagatcttctggttatgtggcctccttctaggtttctgctgaaaacctgagaaaattgataactcatatttgcaatggatgtcataccatggaagaggcttatttaggatctactgtggcgtggatgcattacatgtattatctcacttaatcctcacatcatctctgtaaagtgggtaggtccacaacattttgccaaagagaactttaaagttttaagaggtggagtaattccctcaaagataatagtagagaaagagtcgatactcaattctaactgtccattcatacactttccattacaccaactccactttgtgtaggtgagagattatattacttagagtcctcctaagtgcattagaaacagaaccaataagattgggagtggatgtgtgtatacacacatatatatatatacaggcaaacctcagatatacaggtttagttctagaccaccacaataaagcaaatattgcaataaagcaagtcacatgaattttttggtttcccagtgcacataaaaggtatgcttatactacactatagtctgttaagtatgcaataacattatgtctcaaaaaacaacatatgtaccttaattttaaaatactttatggctaaaaaatactaataataatctatctgaatcttcagcaattcataatgtttttgcctgtggagggtcttgcctcagtgttggtggctgctgattgatcagggtgctggatactgaaggttggggtgactgtggcaatttcttcaagtaaggcaacaatggtctgggcgtggtggctcacacctataatcccagcacttcgggaggcccaggagggctgatcacttgaggtcaggagttaaagaccagcctggccaacatggtgaaacccctgtctactaaaaatatagaaattagccaggcgtggtggcaggtgcctgtaatcccagctacttgggaggctgaggcaggagaattgcttgaacccaggagggaggctgcagtgagcccagattgcgcctcagcactccagcctggacaacagagcaagactccatctcaaacaaaacaaaacaaaaacaaaaaacaaataaggcaacaatgaagtctgcctcattgattgaccattcctttcatgaaaggaaagatttctatgctatttggtagcattttacctacaatagaacttctttcaaaattggattcagtcctctcaaaccctgttacggctttatcaactaagcttatggaatattctcaatcctttgttgttatttcaaccatggtcacagcatcttcaccaggagttgattccatctcaagaaaccactttctttctttctttctttctttgttgagatggagtctcactctgttgccaggctggagtgcagtggtgagatctcggctcactgcaacctccgcctcccaggttcaagcgattctcctgcctcatcctcccgagtagctgagattacaggtacccgccaccgtgcccagctaatttttgtatttttagtagagacagggtttcaccatgttggccaggatggtcttgatctcttgaccttgtgatccgcccgcctcggcctcccacagtgctgggattacaggcagaagccaccgcgcccagcctcaagaaatagctttcttttttttttttttaaagggagtcttgctctgtcacccaggctggagtgcagtggcgccatctcggctcactgcaagctccgcctcccagattcacgccattctcctgcctcggcctcctgagtagctgggattacaggtgcccgccactacgcccggctaattttttgtatttttagtagagacggggtttcaccgtgttagccagtattgtctcaatctcctgacctcatgatccgcccgcctcggcctcccaaggtgttgggattacaggcgtgagccaccgcgcccggccaagaaacagctttctttgctcatccataagaagtagctcctcaagttttatcatgagattgcagcaattcagtgacatctttaggatccatttctaattctagttctcttgctatttctaccacatctgtagttactttctctactgaagtcttgaacacctcaaagtcatccatgagggatagaatcaacttcttccaatctcctttactgttgatattttgatctccccccaggaatcatgaatgtttttctgttttgttttttgagacagggtctcactctgtcacccaggctggagtgcagtggcgccgtctcggctcactgcagccttcccctcccaggttcaagcaattctcccacctcagcctcctgagtacctggggctatagatgtgcagcatcacacccagttaattttttatttttattttttggtagagatgggtttttaccatgttggccaggctggtctcgaaactcctgacctcaagtgatccgcctgccttggcctccctaagtgctgagattacagctgtgagccaccacacctggccaggaatcatgaatgttcttaatgaaacctaaaattattaatcatttccacaagattttcaatttattttccctagatccatcagaggtatcactgtctatggcagctacagccttcaaaagtgtttttttttttaaataataagacttgaaaatcaaaattactccttgattggctgcagaataggtgttcttttagaaggcatgaaaataacattaatctctttgtatgtcttcatcagagttcttggatgtctaggtacattgttagtgaacagtaatattttgaaaataatctttctttgtgagtataggtttcagttgtgggcttaatatttggtaaacaatgctgtcaacacgtgctgtcatcaggttttgtggttccatttatagagcacaggcagatttagcataattatttttttttctcatggggtaggggaaagaaaagtgattagaataattcttaagggctctaggattttgcaaatagtaaatgagcattggcttcaacttaaagtcaccagttgcattatctcctaacaagagagtcagcctgtctttggcacctttgaatacaggcacggacttctcctttctaactttgaatttccttgatggcatcttcttccaataaggctgtttcattttcattgaaaatctgttttttagcgtagccaccttaatcaattatcttagctaggccttctggataacttgccacaccttctccatcagcacttgctgcttcgccttgtgcttttatgttacggagaagacatctttccttaaacctcatgaagcaacctcttttagcttcagacttttcttttgcagctttcttttttgttgttgtttttgtttttgttttgagatgcagtctcgctctgtcgtcaggctggagtgcagtggggcacgatcttggctcactgcaaactctgcctcccgggttcaagcgattctcctgcctcagcctcgccagtagctgggattacaggcccgtgccgccacacccagctaatttttttgtatttttagtagagacgggatttcaccatgttggtcaggatggtctcaatctcctgacctcgtgatctgcccaactcggcctcccaaagtgctgggattataggcatgagccaccacgcccagcttcttctgcagctttgtctctcttatccttcatagaacccgaagagcactggggccttgctgtggattaggctttgacttatgggaatgttgtggctggtttggtctcctatccagaccactcaaactttctccagattagcaataaggttgttttgctttcctatcatttttatgttcaccggagtagcatgtttaatttccttcaagaacttttccactgcattcacaacttggctaaccatttggcacaagaggactagctttcagcctctctctggtttcaatatgtttttctcactaagcttaattatttctagcttttgatttaagtaggagatatgtgactcttcctttcatttgaacatttagaggccattgtagggttattggttgacctaatttcagtattgttgtgtctcagggaatagagaggcccaaggagaggaagagagataggagaacagaacagctggtcagtggagcagtcagaatacacacatttatcaattaaatttgctgtcggtattagtccgttctcgcattgctataaagaagtacctgaggctgggtaacttataaagaaaaggttctcgcattgctataaagaagtacctgagactgggtaatttataaagaaaagaggtttaattggctcatggttccacaggctgtacaggaagcatagtggcatctgcttctagggagacctgtggaagcttacaattatggcagaaagcaaagggggagccagcacttcacatgactggagcaggaggaagggagacagaggtgctacacatttttttttttttttttgagatggagtctcgctctgtcacccaggctggagtgcagtggcacgatcttggctcactgcaagctccacctcctgggttcacgccattctcctgcctcagcctcccaagtagctgggactacaggagcccgccaccacgcctggctatttttttgtatttttagtagagacggggttccaccgtctaggcaggatgttaggcaagatggtctcgatctcctgaccttgtgatctgcccgcctcgcgcgcccggcagttttttgttttttttttttgagacagagtctcgctctgtcaccaggctggagtgcagtggtatgatctcgtctcactgcaacctctgcctcccaggttcaagcaattttcctgcctcagcctcctgagtagctgggagtacgggtgtgcgtcaccacacccatctaatttttttttttttttgtatttttagtagagatggggtttcaccatgttggccaggatggtctagatttcttgaccctgtgatccgcctgccttggccttccaaagtgctgggattacaggtgtgagccaccatgcccagcctctgctacacacttttaaacaaccagatctcacgagaactcacgcactattggaacacagtactaaagggaaaatctgctgctatgatccagtcacctcccaccaggccccacctccaacattggggattacatttgatgtgagatttgggtggggacaacatccaaactatatcaccatcttatatggatgggtgcagttcatggtgccccaaaataaatagtaacatcaaactcttaatgatcacaggtggccataacagatataataagaatgaaaaaaattgaaatattgcaagaatttccaaactgtgacacagagacatgaagtgagcacacgctattggaaaaaatggcacccttagacttgcttgatgcagggttgccacaaaccttcaatttgtaaatgcagtgagccaagattgcatcattgtactccagcctggacaagaatgaaactccatctcaaaaaaaaaaaaagttatagctgattataaaatcatcttttaaagaggaccaaagtgagaaaacaattgtctgtggatgacaaaaacattttagggcagccacagttaaaggcacaattgacaaggaaatttacttctgtggcacacagtcatttaacataataattataattattattgttaacatatactaagtcatattagaattatagcagttttatataattttggaacatacaccaataacacatttacacaaatatagaccaaagaaagtcatttgatatttgacaatgcttcctgtatgatttttgtaccaaataagccattttgagactttagaggacctaatatctaaatattaggttagaaagagacataatttataatttgattttggaaagcttgtcaaatatcaaaggtttaaaacaccagatatcacaaaatagaatcccaagtcaccataagtcattcatttggcaaaaataactcaaaaaaattaaaaaaaaaaaaacctttattctgatagaggagacttagctttccaaacaagactcaatgaagatagcatgaagccagctgaatctgtctcttctttctgtcctcctttttttccctgccatttacccaaaggagaaaacaaaactctttcattatcttttaacattacataaaaatcatctttgaaagagaaaaccaaatttcatgtttgcattagtgcatctttggtgctaaagctagtttttacataaaattgtatatatctatccagttttaattagtttgaccataaggtaagattttcataaactttttagaacgctttataattttccatcaaacagaagatccattttctaagaaaaccctgttatttggacacatgggcccagattctggccccacagcagtgtgattttaatgttttaacctatggaaaaatgctaaataattttttttagctcttggccaacttgtttatacccacagaattttttacaagatcaaccctttacaaacccttttcactttgcttaaaccttcagtttcgtcccgttagtcttttaggttaagacaatctttaaaaccctcaggcccggcgcggtggctcacgcctgtaatcccagcactttgggaggccgaggtgagcagatcacaaggtcaggagattgggacaatcctggccaacatggtgaaaccccatctctactaaaaatacaaaaattagctgagcatgatggcgcgcacctgcagtcctggctactcgggaggctatgataggagaatcacttgaacccgggaggcggaggttgcggtgagccgagatcacgccactgcactctagcctggtggcagagcgagactccatctcaaaaaaaaaaaaaaaaaccctcaaaactagacaaaattacattccgtttaacaaaagccatattcctatgccttcttataatcttttaccaaaaacacattccctacacacctttatgtaaaactgtttctccagtggtctcaattacatgttaccatattaactcttagcaacttttatttttagtgaaaactctgataagtaagatattttaattatgtattaggggtggagcctaggacattagacagaaatgaagataaggtcagactctttttagcatagctagcgggcatggctctccatatgtccccaggccttatatattatctaagcctccaaagtaggtaaatcaaacaattttcaaaagtcaaagaaacagcttgaccttaaagcatttagcaaatctgaccttaatttagggcaaatgtctacattttcaagacaacttattttaccaataatctttaaaactgtccttatttccaaaagattactaaagccatgtgaacaaaaaggcgttaaagtttctatttttctgacaaaatattttatttaagtgcttttttcctaagccaattaatcagagctcttttatatataaacatcacacacacacacacatacacacccacacacacacacaccccacatgtaaatagagacagacagaagattgggcacttgtaagatttttcatttgccaatttcttaattggatgaccggcttcagggtggagctcttggaggaatagagctgggacagcatgcgtttctaggaccaaataagtagcaaataaacagctgaaggcaagacagatctccaaagttaaaggtaccgttttatactggtttctccatccccaaaaggagggaaatactacgggagaagacggtgcagtgcttttactgactgtgcatttcattgcaaagcaacccaaagccaatcagcccattttgtaatcagcccatcttcatgagagtctcatctcctagtgaggggtgaggatgttggatggtggaaaccaaaagaaagtatccccatatggtcacaagatttagctctgaaggacacaaaacaagacatagaaatttcttacagtattggctatcatatatcaagtaggaaaaataagttataggatagtatgacctcatttttaaaaaacaaacgaactcctgaaatgccaaactctatatgtctatgtccatagctgtatcttcgtctaatctatatttatatgagtcataggcatagaacaaaatctaaggaaagagcctacacagcaaattattaataggttatctctggtagtgacattgggtagaaagggattagattgttatttttcacttaatattgttctgtgtttcaatttgtcattaaaattatctatagcatgcatttaaaattgttttaatttttatttaaattttgttcacaagtgttgtcaataagcattttttttttgtaattcacaaaatgataaatatttttaagtgaaaatagaaaatagtttcagctaggtgcagctgagcatgcctgcagtcctagcctgaaactctttttcaggaggctgaggtggtgaaactgcctttgcaaaattatgactgagacagtgaaagagatctaacttaactgactccatcttacttctaaccgccaagctgtccttgttcattcctgggtgtaggctgaaccaactttgggagaaacgtagtttatagtttaaacaaacatggtaatagccctttcccaaagcagacctcccttttgcctggggaatagattgcctttggaggactaacattagccacaagattaaaattatagtttagaagtcatggagctggaggctacaagattctgaccctccctgaactgttactaagatcagtgcttaacatcgtttgcagaccctgcgcttgatggagatgagggttcatctagtgccctgcccgtgactgtgttcagtttcaagtccattaaatgccaggaatgtaaatgccactgttttctaatgcagctttaatttttttatttatcaaaaccctgaaacgaagtgtttttaaaatcatctaattttacaaagtagtccccaaaagtttcttccttacttcttccctagagctgatgtcttgggaattttcctccatatctccaaatcacacacttgtattgctacttcttgacttttagttagaggcattatctgttaacctcccactagggaagatgtgaatttagttctattttctcctcctcccgcactacacacatgtgccctctccccctacccctttctttcccatatagttatatggttaattccatattcagtgtttacattttgatacttatatttgttttattcaacttcagagctgagtcatatagtaaatatgattgctttttctgcttaattttgtttttcctggtattggtaattattgagtttttgttagtatttttcctctatttacttatgagtcctttaaccccaaattgtttgccagttttctgaatttcttcccaacaacttcaacacatagatgttttatcattttcatcttcatgatgaaatcacttccagtcctactaccttttaaactagttgcccattattcctagtgcttagctctcatcctgggatctgccttcaccatgaccctggagattccattagcttctctcctgtattagactccttcttcttatcttcctctttcttggtttacacccgcattttggtggaacacatcccctactagcttcctatgacagagaggaggtccaggagaaaagagttttgaaattctacttcccaaggatatttaactctcatacttgatagtttggttggacatctccttacattttcagaaacgtaaagtatagaaaaatattttccgtcataaaatgagacaacatttatgtgaaaaagtgaggtaatattttcctaaatgtatccatccaaactctgaatctgaaagatcagtgccttctgcttctcttcaagatgtggcaagtcttaattccaaataggtgaattttatatttttatttctttttggttttcaaacagggatctatttgtgatgactatatggcaactctttgctgtcctcattgtactctttgccaaatcaagagagatatcaacagaaggagagccatgcgtactttctaaaaactgatggtgagtcaatgcaaacatgcctctcagaacatgtgggtttttagaaatatcactaaagactttgtcaattatttgttgttttgaataattcagcaataactatttcttaagtctcctgaagtgctatcataatatcaagattggctttaattttcttcttatgaagaagatagctctatactttgaaaccatattttagtaaataaaggaatggtgaattttctaaacttctcagaattctggtgatctattaaggaagcacttaccacttgtaaaataccagagtatggtgagatacaaaagaattagaaaacatgttccctgctaagacaaacaagttgacaaaaggaattcgtaaataattataaaatagaagagtaaagaaaataacattctgtatgatatttggattgattgtggcataaagcatctatcatagcaaggtgaggttaaatagaaaactcctgttggagaagctgaactttgaaagaggtgaacatagaatttagaatgtttggaaatgttatatagaattaaccatctgaaattcaatcaagtcattttcaactaatttttctcaggactatctattgaggatgtagttaagtagaaatcaacatgacttactccatcccctgtagaatatatattaagtatgggaagaacacaatttttctactctttgtaatatccagtttccttcctgaagtgataaggactctgtatgggttaataaaaataactcttgggagatacgtaaaaaaatgttcatttacttagcaagtaatgtattaaggatctaggatcaagtatatattatcttagcaactaatgtatcaatgtatcaatatctaagactaggtaagatactgttaggtattgtagtagggttggggagcaagataaataagctagtccctctgtcattatagaatttatacgaaaaagggggattagacaaacccctaactaaaatgcagaattcaattaatgcctatagacaaagcggtattttatgttcagaggaggaaaagatcacatcttgtaagatgtataggtgaaagtttcttgaaagcagtgatttttaattctaaaggggaagtgcgtattagttctcaacaagaaacagatggcactcaaactgtgatagttcaaagatttaatgaagactaattataaaggtgtgggtggggcattgtagggagatgacaagggatggcataataacctgcctggcaacagccccagggaggagaagagggagcagtgacctgaatccttaaggagagagctgtgtgaagaggcctgccctgaaagaaacagtatcctctcaagagagggttgtgagcagcccgaggcaacccatagaactgaaaaagtaccctgacctcactttcggatgtccttctggttttcccattggctgaacccaccagaaaggcagagggcagcaaagtgtcacggtagtccgcaggtcgcttcccagggcacacagcaggatggtcaagggagtaagtaaatcagataggggcaaacagaggatcactgactcaagatgtggttttaattaatagaaatggaggctgagtgcagtggctcacacctgtgatcccagcactttgggaggccaaggcaagaggactgcttgaacccaggagttcaagaccagcctggggaacatgttgaaaccctgtctcttgaaaaaatacaaaaattagctaggtgtggtggtgcacgcctgtagtcccagatacttgggaggctgaggtgggaggatcacttgagcctgggaggtagaagctgcagtgagctatgatcacaccactgcactccagccctgtctcaaaaaaaaaaaaaaaaaaaaaaaggaaaagaaaaagaaaagaaatgaaatgttgcttctaatcagcaatattaatgaaactagagaggcaaaaacagagaaaatatctttatgagcttaggtccaacttggctagaacatatggcataagtagaaaaataacgaaaaataaaagattttaaaggccttagcatgcgatgtctgaatactaagctaatgacttggtaggaattgggaaattattgcaggcttgaagtaaatgaatagaactactctttagaaatatgaatctaaggctgggcatggtggctcatgcctataatcccaacactttgggagaccgaggtgggaggatcacttgagctcaggagttcagcaccagcgaccagcctgggcaacatagcaagacctcatctctactaaaaagtaaaaataaaaataaataaaattttaaaataataaatattaatctaataatagtatatagtacagattgtacaggatgaggccagaagcaaagatggggagttagatcattccaacactgtttacttaaataaatacatgaaacaatttggatcaaatatctacccacacattcatagtaatgagtcctgatagctcaagtgttttctttaacctcagggaaaatatctcactgaatctttaggtgggtttgaagtaaaataccttggcggtcctgactcctcctcatcaacttggaccctacatcactcactggcaataaaactttagacaaacagatatcgaaatggggagctaaacaagagagaaagagcaaggaataacaacatgatttacgttaaaatagattgagatgaaggacataggaatccactggaaaagctccccatagtccaaactggggcactttgaggaacaaaataaggtcgtgttagattataacccaaagtataaaatatctatgagtttgtgctgacataaatgactgaataaaatttgaaaattgaaaaaaagtatgtatgttgaaagcagggaaaactgggaattttgagagcaaagaagtggcaggagaatttctgtatgggagaagagacacatctcccatatggaactccaaatatttaggtagatactccttcctcaaggagagcggcatgattccccaccctgaagtgggggtttgcatagtgacttccttccaaaaagtacagcatgaaaagtacagcatgcaagtgcactctctatactgtatggagtaactccacaatggagaaacctgacacaatgacctgagccaggtaatcaacgtcaccatcattggtaataagtcatattgatagtttgcacccctgatttgatgtgatgagaatggcactttacctttgtggtcttctccccaaaacctcttaactccagtctaaccatgagaaaaacatcagacaaacctaaactgaggcacattccacaaaatacctgactactcctcctgaaaactgtcagggtcatcaaaaacaaggaaaggctgagaaacagtcacagtttagaggagcctaagagaagatgacaattaaatgtaatgtggtatgctggatgagatgctggaacagaaaattaaagtaggtaaaaactgagtaatctgaaggtagtatgggctttgattagtagtaatgcatcagtatgggttcattagttttgacaaacctcccatggtaatgtaagatgttaaccaacaggaaaattgggtgccagatacatgagagctcgctgtactatctttgcaacttttccgtcaatcaaaaatgattctgcaattaaaagtttattaaaaattataaaagtaccttaagaaaattcaaaactcttgtgtgtcctttataggtgaaaagctcttaccgaagcaacaaaattcagcagacacctcttcagcttgagttcttcaccatcttttgcaactgaaatatgatggatatgcttaagtacaactgatggcatgaaaaaaatcaaatttttgatttattataaatgaatgttgtccctgaacttagctaaatggtgcaacttagtttctccttgctttcatattatcgaattcgaatttcctggcttataaactttttaaattacatttgaaatataaaccaaatgaaatattttactgataagattcttcatgcttctttgctctccttaaaatgtctttttcactagttagttccaagggtcagtctcataattttgttcttatactttgatttcctttttctttttttttttttttaatagagttgggggatctttctttctttttttttttttttttttgagatagagtctcgctctgttgcccaggctggagtgcagtggcgtgatctcagctcactgcaacctccacctcctggatacaagcgattctgctgcctcagtctcccgagtagctgggattacaggttcccgccaccatgcccagctaatttttgtatttttagtagagacggggtttcaccatcttggtcaggctggtctcgaactcctgacctcgtgatccacctgcctcggcatcacaaaatgctgggattacaggcatgagccaccgcgtccagcctagagttgggggtctttctatgttgcccaggctggtcttgaactccgggcctctagcaagcctctcatctcagcctcccaaggtgctggaattacaggtgtgagccactgcaccatactttggtttcttagcaggagattttggttcacagtaacccagctctctttcatctaagaactttagatgagaaaaaaaaaaaa

SEQ ID NO: 746 - DNA, 8586 bp, Homo sapiens
tctgttcccacttcctccccgccccaggaaacctgccatggcctcctggtgagctgtcctcatccactgctcgctgcctctccaggtaagttatcccattctaccttttccccccacccagaatgcctgggagacctcccaggaaaggcttcctggctccgtccctcctcccctcggcccccatcctatgggccctgattcatgatgtggctgggctggcacaaaatcccggtggagagtcaccaaactgtccatgacctggaatgtggccagcaccccctagtcacaggcaggggtctttctgggtgtggcatgcaccaccgttggggaggacatggaaggttctgggtgatttgccaaaccggaaggaaagagtgacgtttgtctctctctctggcagagctctggagtggagtcccctctgcaccccaaccccatcaacagcctccccccactcatcttttctggccttggattctctctggccctgccctgcctggggtggacttaagatgcattttttttttctttttctttgagacagaatcttggtctgttgcccaggctggagtgcagtgatgcaatcatggctcactgcagcctcagactcctgggctcgagtgaccctcctgcctcaggctctggagtagctgggactacaggtgtgtgccacctcacctggatactttttaatttttttttcttttgtagagatggggtctcactatgttgctcaggcaggacttttttttttttttttttttttttttttgagacagagtcttgctgtgtcgcccaggctggggtacagtggcatgatctcggcttattgcaacctctgcctccctcgttcaagcaattcttgtgcctcagcctcctgagtagctgggattaaggtgcctgccaccacacctggctaattttttatttttagtagagacaagatttcaccatgttgccaagggtggtctcaaactcttgacctcaggtgacctgcccacctcagcctccgcaagtactggcattacagccatgagccattgcacccggccaatcaggcaggtcttgaattcctgggctcaagagatctgcccacctcactctccgaaactactgggattacaggcatgagccaccacgcccagctatttttttgctttttgcttcctgatctttgtgatgtctcagcagagtagcattttttaatctttttctaggaaaaaatatcttgggttcaactggggtgggatctcagtcctcatcgcgatctcacatgtctgtgtgaagagaccaccaaacaggctttgtgtgagcaacaaggctgtttatttcacctgggtgcaggcaggctgagtccgaaaaaggagtcagcaacggtggtgggattatcattgttcttataggttttgggataggcagtggagttaggagcaatgttttgcaggcagagggtgaatctcataaagtacattctcaagggtggggagaattacagagaaccttcttaagggttggggggagattacaaagtacattgatcagttagggtagggcagaaacaaatcaatggtggaatgtcatcagttaaggctattttcactttttttgtggatcttcagttgcttcaggccatctagatgtatacgagcaggtcactggggatatgatggcttagcttgggctcagaggcctgacattcctgtcttcttatattaataagaaaaataaaacgaaatagtggtaaagtgttggggtggcaacaattttttggggtggtatggagagataatgggcgatgtttctcagggctgcttcgagcgggattaggggttggtgtgggaacctagagtgggagagattaagctgaaggaagattttggggtaaggggtgatattgtggggttgttagaaggagtgtttgtcgtatagaattattggtgatggcctggatgcggttttgtatgaactgagaaactaaacaaaagagtggctgccaggtgagttgaacagtctgattttcattgggggtccttcacagatgggacatggcttaggaggaatcccgggctgcgggcattccttggcccggtggccagatttccaaaacttgtagcaagctcctgggggaggaggttctggaggaacccctggcagctgcggttcaggcgtttggagttcttgtgttctggagatgtggctggggtttgtctcacggtggaggcaaggaattgcaactcagaaatacattgctacgtggctgcctctactcttattattgtacaccttgaaggcgaggttaattaagtcctgttgtggggtatgagggccggaatttaatttttggagctttatttaatgtcaggagcagattgggtaataaaataaaatgcattttgagaataagacggcattgtgacctttcagggtctagggctgtaaaacatctcaggattgctgccaaatgggccatgaactgggctgggttttatatttgatgaaaaagagcctaaacgctaactgatctgggagaggtcggataaagaaaaaggagcattaaccttgactgtgcctttagctccagccacctctttaagaggaaactgttgggcagatggaggagggctagtcacggaaagaaactgtaagctggactgggtgtgaggaggggaggtaataaaaggattatagggtggaggagcagaggctgaggaagaattgggacctagctcggcctggtgaggagcagcctgggaaggaggggagaagtcagatgggtttgtagaaaaggaagattcaagactcagcaacgcttggggttggaactgaggggacaggcaggagggaaagaaggaagatttgggatgaactgcattgggaacagagactagggagggaccgatgtataaaagaatgcctgaacgtcaggcacctcagaccatttgcccattttatgacaagaattatttagatcttgtaggatggaaaaattgaaagtgccattttttggctatttggaaccactgtctggtttgtattggggtcaagcggcattgcagaagaaaataagacatttaggttttaggtcaggcgagagttgaagaggttttaagttcttgagaacacaggctaagggagaggaaggaggaatggagggtggaaggttgcccatagtgaagtaggcaagtttaaagagaagggtagagacacggagagaaggggtgggggatgcttatcccccaggaaagtggagaagggatgggaggtgcttgccccccaggaaaatggaaacggggtggggggtgcttgcccctcaggaaagtagagaaggggtagagacacggagagaaggggtaaggtgagcagccaaagcaggcgtccctgcaattgacttgccaccaagggatgtgggtgaatgaccaaggcaggtgtccccgcggagatcagacacaaatggaatgtgggtgaataatcaggcagtcgtccccacaatgattaaacaccaagggaaggctgccttcccaagtccgtgaccggcgccagagttttgggtccacggataaaatgtgtctcctttgtctataccagaaaatgaaaggaatttaaattaagagaagggagagattgaaggatggtgccaagattgaaaggagaaagaggttgagggatagtgagagaggttggagaaggagtaaaagaggccacttacccaatttaaaatcagtgagatgttccttgggctggttggtctgcggacctgaggttgtaggtggatctcttcagggagtgaaggtgaggacaggggactgctgtcccgaaggagtcccgctgacccgggtcttcggcaccaaatgtctcatgcgtccgtgtgaagagaccaccaaacaggctttgtgtgagcaacgaggctgtttatttcacctgggtgcaggcgggctgagtccaaaaagagagtcatcaaagggtagtgggattatcattggttcttataggttttgggataggcggtggagttaggagcaatgttctgtgggcaggggtggatctcacaaagtacattctcaagggtggggagaattacaaagaacctttttttttttttttttgagacggagtctggctctgtcgcccaggctggagtgcagtggctctttctcggctcactgcaagctccgcctcccgagttcaagccattctcctgcctcagcctccggagtagctgggaccacaggcgcccgccactacgcccagctaatttttttttgtatttttagtagagacagggtttcaccgtgttagccaggatggtcttgatcttctgacctcgtgatctgcccgcctcggcctcccaaagagctaggattacaggcttgggccaccgtgcccggcctacaaagaaccttcttaagggtgggggagattacaaagtatattgatcagttagggtggggcagaaacagatcacaatggtggaatgtcatcagctaaggctattttcacttcttttgtagatcttcagttgcttcaggccatttgaacgtatatgagccggtcgtaggggatatgatggcttagcttgggctcagaggcctgaaaatcgcccccaccaatcacctgtttcccccaatctaccctcctgaaggtcactgacaaagacttcattgtctcctaggagaggctgccatatatccagggctgacgtaattccatcttaatatcagttacattataaaaatttacctcgtgcctgaggccccagagcccaagggtgcaaagcagtaattggtcaaagttcaacttccctcccactctgggctcaggctgtcccctgagggcctgtgttttgagtctctttccagaaccttggtgtgaacttaggtcttggcgtcgggatcccttttcgtcacactcaggtgacctacagggagctccgctcgacactgcaaggcttagaccagttcggtccaacagagaaagcaggcaaccaccatgtcatttgaaaacagtttcatcgggatataattcgcaacccatacagtgaatccatttaaggtgtgtaagtcaaaagtttttcgtgtattaccttatgtttatttatttatttatttatttatttatttattttgagatggagtctcgctctgtcccccagtctggaatgcagtggcactatctcggctcactgcaagctccgcctcccgggttcacgccattctcctgcctcagcctccccagtagtagctgggacaacaggcgcccgccatcacgcttggctaattttttgtatttttagtagagacggggttttaccatgttagccaggatggtctcgatctcctgaccttgggatctgcccacctcagcctcccaaagtgctgggattacaggtgtgagccaccgagcccagccttttattttatttttttaagacaaggtcttgctccatcacccaggctggggttaagtggcatgatcacagcttgctgcagcctcaaacttccagactaaagcaattcccccaagtagctgggactacaggcgcatgccaccttgcccggcaaatttttgtatttttagtagagttgggattttgccatgttgcccaggctggtctttttttaaaaaaattatttatttatttatttttgagatggaatcttgctctgtcacccaggctggagtgcagtggcatgatctcagcttactgcaacctctgcctcccaggttcaagtgattctcatgcctcagcctcccgagcagctgggattacaggcatgagccaccacactcggcttatttttgtatttttggtagaaacagggtttcaccatgttggccaggctggtctcaaactcctgacctcaagtgatccacctgcctcagcctcccaaagtgctgggattacaggcatgagccaccaaacccggctattatttatttatttatttttgagacacaatctccctctgtcacccaggctggaatgcagtggtgtcatcttggctcactgcaacctccgcctcctgggttcaagtgattctcgtgcctcagcctcccaagtagctgggactacaggtgtgcaccaccacacccagctaatttttgtatttttagtagaaatggggtttcatcatgttggccaggctggtcttaaattcctgacctcaggtgatctgctcacctcggcctcccaaagtgctgggactacaggtgtgagccactctgctcggccggtcagctcatatattacctgcaaaacccagtcccattgtacctttctctggctgagtcatggattcaagccttgcctcagtgacatgggaagcaatgatgaccggctatgccttctcccctgcctccagggcacttgtatttcagtagactggggaagacttcggggattccaggaaaggtcttgtctaataggtagaaggaagtggactctgggacaaggtccctttgttcaaacaccagctgtgctgatttttgctgtgagtcacttggtctcagttttctcatctgtgaaacaggaataatagcagctcctctcaggactcatggcccggagctttggtaagcaggagattgtcatcaatgaccctcactcctctctcctctcttcccagatactctgacccatggatcccctgggtgcagccaagccacaatggccatggcgccgctgtctggccgcactgctatttcagctgctggtggctgtgtgtttcttctcctacctgcgtgtgtcccgagacgatgccactggatcccctagggctcccagtgggtcctcccgacaggacaccactcccacccgccccaccctcctgatcctgctacggacatggcctttccacatccctgtggctctgtcccgctgttcagagatggtgcccggcacagccgactgccacatcactgccgaccgcaaggtgtacccacaggcagacatggtcatcgtgcaccactgggatatcatgtccaaccctaagtcacgcctcccaccttccccgaggccgcaggggcagcgctggatctggttcaacttggagccaccccctaactgccagcacctggaagccctggacagatacttcaatctcaccatgtcctaccgcagcgactccgacatcttcacgccctacggctggctggagccgtggtccggccagcctgcccacccaccgctcaacctctcggccaagaccgagctggtggcctgggcggtgtccaactggaagccggactcagccagggtgcgctactaccagagcctgcaggctcatctcaaggtggacgtgtacggacgctcccacaagcccctgcccaaggggaccatgatggagacgctgtcccggtacaagttctacctggccttcgagaactccttgcaccccgactacatcaccgagaagctgtggaggaacgccctggaggcctgggccgtgcccgtggtgctgggccccagcagaagcaactacgagaggttcctgccacccgacgccttcatccacgtggacgacttccagagccccaaggacctggcccggtacctgcaggagctggacaaggaccacgcccgctacctgagctactttcgctggcgggagacgctgcggcctcgctccttcagctgggcactggatttctgcaaggcctgctggaaactgcagcaggaatccaggtaccagacggtgcgcagcatagcggcttggttcacctgagaggccggcatggtgcctgggctgccgggaacctcatctgcctggggcctcacctgctggagtcctttgtggccaaccctctctcttacctgggacctcacacgctgggcttcacggctgccaggagcctctcccctccagaagacttgcctgctagggacctcgcctgctggggacctcgcctgttggggacctcacctgctggggacctcacctgctggggaccttggctgctggaggctgcacctactgaggatgtcggcggtcggggactttacctgctgggacctgctcccagagaccttgccacactgaatctcacctgctggggacctcaccctggagggccctgggccctggggaactggcttacttggggccccacccgggagtgatggttctggctgatttgtttgtgatgttgttagccgcctgtgaggggtgcagagagatcatcacggcacggtttccagatgtaatactgcaaggaaaaatgatgacgtgtctcctcactctagaggggttggtcccatgggttaagagctcaccccaggttctcacctcaggggttaagagctcagagttcagacaggtccaagttcaagcccaggaccaccacttatagggtacaggtgggatcgactgtaaatgaggacttctggaacattccaaatattctggggttgagggaaattgctgctgtctacaaaatgccaagggtggacaggcgctgtggctcacgcctgtaatcccagcactttgggaggctgaggtaggaggattgattgaggccaagagttaaagaccagcctggtcaatatagcaagaccacgtctctaaataaaaaataataggccggccaggc

SEQ ID NO: 747 - DNA, 205189 bp, Homo sapiens
gccgaccaagagcaggagctggagtctgagccggtggttgcagcggaggcggtgatgtcggtgcaggttgtgtcagccgcggctgccgccaaggtgcctgaggtggagctgaaggacctgagcccctccgaggcggagtcgcaactaggactgagcacggccgccgtgggcgccatggcccccccggcgggcggtggagaccctgaggctccagctcccgccgcggagcggcccccggtccccggcccgggctcggggcccgccgccgctctcagccccgccgccgggaaggtgcctcaggcgtcggccatgaagcggagcgacccacatcaccagcaccagcggcaccgcgacggcggcgaggccctggtcagccccgacggcaccgtcaccgaggcgccgcgcacagtcaagaaggtactggggccgggctgcctctctaggagaggaagggaggggaggggaactgcagatcctctcggcacggcggcaccaccctccacgccctcctttctgatcgcaggaccggagataccccttgtccccttaaacccactctctcagagatgccccccagccggcccctcgtgctgggagcggagactccaggaggcacggccgtacttcgctctgaataacatggaggtagcgctctcccctactacttggaataggcagcgggaggagagacacctaatagtacgtcccgcggccccaacacgctcccgggtgtgattttccagcctatcggggaagagacctcgatagtatagaaaaaccttaccgctcacgggagttcacacagcaataaggatgaaaagatctttaatacttggagaacgagtaaggtgtagtcaccttgcatagaaatcgtcagagttgtctggtttccatacagttgatgactttctgcctttctgtggccaaccgtggccatacagcaacacgatgctgtgcccttcatttccagcgactgcgatattctctcttccctgaatatgtaaaagggtaatggagagattctcctcactctttcgtgttaagagctttgtcctccctgctgggtatagttggtcaccaggattattaggctgtgtatgaagagaatgaatgtcttattgattgctttattataatctgaaagtgataggaagaaatgctgctacttttgggaaagacgatctttgtggggttttcggtcttaggcgtcagcttctttcagacagttttgaggaggtctcagaataccaagaagtaactgcctaggtggatgatagccctgtattacccgtacattgtctatccatagttgtctgtctctctcaaagcttgtctttctttctctcttaaagctgaatcagcacagaaaaacagggcaagtattggaaaagacagaagtgtggatcatataaaaagggcttacagcttcaatttcgtagacacagtatgggcacagggattaatgttttttttaaattgttgtgaatggtttttaattgctttatcagaacagcaacaaagagacgggaagtgtgcattggttttactgtgtgggaccagctgaattggaaccttggatccaccataactttttgttgtcatagcgtcatgattaaggtatagcggataatcctttcatcctaacgatacaaatttaggtgataagtcagaggcaagactgaaggaatttctgtaatgctttagacaatgtctttgtcgtttgtagtatgaaactcctctgggaagaattagagtagaaagaggcagcatcctgcagaaatgggtttaaagaaaaaaagtaaagtaaaaaagagaggcagcagcagcaccagtgctgggagtacctagatctgagtctggaaatccaaagcatacttctgacttgttgagatactttgtatcgttaagtcattttcttgtgataaagactgtttttgtctaaactttgtaatttggttagatttctttaggctaaaagtgtttaacaaattgcttttagagcatgaagtttacagtcaggcagacctggatttgaagcctagtacccccattactaccttttgggtaatttccaaattacacaaatcagtttcctcttctataaaatgaaagtactaattatgattgaggattagaaatatttgtaaaaggtttagcattgagcttggcacataaagtcttaaatgatattcttactaatgcttttattattatgaataattgattttattttattcctcccatcatggcttaagtgcaagcccccatgaccacctctgaaagttacacacagttcaatatattctatataaagaaattaaaaaatcatggctcacgtctgtaatcccagcactttgggaaaccacggctggtggattgctcgagtccaggagtttgagaacagtccgggcaacatggtgaaaacctctctctccaaaaaaaaaaaaaaaaaaaagagccgggcatggtggtgtgtgcctatagtcccagctactcaggaggccggggtgggaggatcacctgagcccaggaagttgaggctgcaatgagcactctagcctgggtgctggagtgagaccttgtctcaaaaaaaaaaaaaaaaaaaaaaaagttaaaaaatcaaagaccagcatactggagtctgtttttcttaattctagatgtgcttcttgaccactttccttgtcgttgaaccatcttcctgttttttcagcaccaaatgtatgttccatgattgtagatatactcagcagcctcaaggctattgtaaagcagggctgagcttgccttacaatgttaattgcaccaaaaaaacaacttctctgctgaaagttaagcaggtgaagctctgggcaaggatacagctggatgacgaaattcagggcattgctgagctgcttttcaggtgcccaatctttaaccttcttgatattgaattggctaaatcaaaataagtgcccaagactgccctttccctaagttgaaagtcatctcaccaaggaactgcagtgtgacattttgatttgttgagcctttgttgattcttagattgtctatgtaaataaccactttgaccttgactccttactgtttttcttatagcatatgaaggaactgagaatactagtattgaaatagctgcctttggctgtggaactggtgactgttgcatttgttttttaactttcatgtataaacatttattttaagtcacatttccatagatggttttccttacttcattcacatatcatcagttttcttagttttgttactctgctcagccacacaaggggaataaactttttacaagagccagaattcccaagtgcagtagttaataagaaggaacatatggtgtgcaggttactcaatcacatcttatctttggcacctgcctccgtcctgtaacttgcgatgctctgggggccagatcatgttatgtggctatgatatatttaattatagtgtcctttttcataagttgacatcaagtgaacccagcaagccaaaaatctctataagaagtaatttgggaaatgggaaggtaagttccacagggaatgaggtagtactagctgaaagggatttcttccttgtgttcttgaaaatgagtgataggagtgttggcgcacagcagggaaaacaaggcaggagaggatttatttcagaaatattaaaactttctgacaataaggctgcaagcccaagaacctcaactagattgtgcttacatcagtatcagtaatgaccgtgttcaaacagaccctttattgcttttggcaaacatatccaccttccactggctttgttgctgtcaggagagaatgagttgagccatgttagcacttcttgtcctgaattgtttaagctcttgatttggttaattatagagtactaaaatggaatgttttggataaagacatgggaatgtggtagcagtatgactccttttgcctgttacaagagtactgctctgaaaagtgttcagtaaggcaattggcagttggtctgtaataatagttaccaataattagcctttttttttttttttttttttttgagacagagttttactcttggtgcccaggctggagtgcaatggtgcaatctcagctcaccgcaacctccgcctcccgggttcaagcgattcccctgcctcagcttcctgagtagctgggattacaggcatgcaccaccatgcccggctaattttctattttcagtagagatgaagtttctccatgttggtcaggctgctttcaaactcccgacctcaggtgacctgcctgcctcggcctcccaaagtgctgggattacagatgtgagccattagccttttatgtgccaggagttgtcataggggttctgtaatcctcacaaccatactatgagatgtaggtggcattatttccattttatagatgcagaaatgagatcctgggaggttaagtgccttgcccaaggttatacatctagaaagtgtcagaggtagaacttaaatccagggctgtccgtctccaaagcccatgtccttttcattatgccacagtgattctaacttcttagatgctgagttcttgctttctcccagaggtcttttagaatactaagtgaactctaaggcgtgtctgtctggctaaggcttaggtcatcccaagaccaaagtaaggcaggtctgagttagagctttaggaagaggatgggagaaaattgtacaaatgtagaacttgaaagaattgtaaatttagaagaggagaataaaagcatcttatacagaaaagcatttcaagatcaatgatgcagcttcacactggtaatttactgataatctgagaaatttatccatattttaaaagttataaataaatttggagtacctgaggaatataccctttcttcctgttcagctaacactttttccctattctttaagcctcaccatctctatgagtcaatctttgataagagcttttgaaaattgcaaagggaagaatattcctactgtataccaggcattgtacttagagctttacatatactgttttatttaattctttttttttttttttttttttttgagaccaagtctcgctctgtcacccaagctggagtgcagtggcgatctcggctcactgaaacctccgcctcctgggttcaagcgattctcctgtcttgccctcctgagtagctgggactacaggtgtgtgccaccacacccggctgatttttttaatttttagtagagactgggtttcaccaagttagccagggtggtctcgatcttctgacctcgtgatccacccgcctcagcctcccaaagtgctgggattacaggcatgagccaccgcgcccggctatttaattcttttaagaggcctcgaagatagctagtgttctccttgttttattgaagaaactgagtgtcgaagagattaaggaatttgtctcaaggttacacggtaatgtgatggaactaacagagccctaaactgttgcttttcaattcaaatagtactctgttcgaaactcaggatgaaccttctaaatctttttttttttttttttgagatggagtcttgctttgttgcccaggctggagtgcagtggtgcggtcttggctcactgcaacttctgcctcccgggttcaagtgattcttctgcctcagcctcccgagtagctgggactacaggtgcacgccaccacgcctggctaatttttgtatttttagtagagacgaggtttcaccatattgtctaggctggtcgtgaacttctgacctcgtgatccacctgcctcagcctcccaaagtgctgggattacaggcgtcagccaccacgcctggccctaaatcttaatctgtgttttttgggtagtttttttgttattgcactgacagtttctttttatttattgcgtggttgaaggtcttaccgtgtgtttttgtgagcatttattttctgagaaagcagcctgaggtgggcagatcatgaggtcaagagatcaagaccatcctggccaatgtggtgaaaccctgtctccactaaaaatacaaaaaattagctgggcatggtggtgcactcctacagttccagctactcaggaggctgaggcaggagaatcacttgaatgcttgaatgcgggaagtggaggttgcagtgagccgagatcatgccaccgcgcttcagcctggcgacagaatgagactctgtctcaaaaaaaagaaaaaaaaaagctgctttaggagctgaagttgcagttgtgtgtttgatgtcttgaggaagacaattactactactactactactagtactacctacattctcagtatccagttaattgaagaaatcgatagttcattaaaaagggagagtgagtttattatatcatttccttggaagtgattccctcccccacgagagaaaaaaagtttgttgtaatctttattcagaccctttgtcaagtttataaagaatatgcagtttgtttcatggtggtttttgtttaaataatttagagaggtacaactgaggcagatgggaagagaacaatcttggcagttgccctgatccactgccctgctgtcatgtttaggtggtagacacaattagaggagctgaaattccattcacccaacaagaggtttagtaaacttgatcagatttctatggaatttgtaggagctttttatagtctgaatgacctatggcctgcgatttggtgagagcagagcagaaagcggcagtggattgacgtttcttctgtaacagttcccaactctaaaattactttgattaaattagatgattatttgtatgggtttcagtctcccttttccccagctgtatcgtgcaacagttcagttagctatttccctcttggacgcttgcactaaaagctggtgattttattttctttttttttttcaagggtctatcagtagaaatctattggtttggggcacctagttcttagcttagaacctatataaaggaagggtatttgaactgctgattgagtttctctgagtataggactttagcctttctgaatgttgcaaacctgaggctaaaactagcttcatcttctctgcacacacttacattctacagtgctccaaggtgaaacttcatctattgactaccttttcttggaaactcttctcttggcttcagtgtcacttataattgctaccatttactgaatacttactccgtgtcaggaatctctgtcttagtatttaatcctcatgacaactttatcagatgtgtagtactatctttatattatggataagaaaatataggctcaaagagagtaattaacttgtccaaggctttgtcaatgaaatgctggccatagcaatattgggcagctttgcctctgtgccaacacccgtgctgctctgaccagactcccactgaagtctgcttaagctgctgctaagaccactttggatctcacaatctagcctctttcaaggggaggcctaaacaccatgcctcacatccctgtttgtttcagtcactacccgccatccgccatccattatcttcccaatactaattcctttaccactctcttcatccttcagctgattcagtccctcaaactgttccaccatgttctttacaatatccccctccttgatcagcagattcacatgtagtatcagtctctagcagcaagatcaagttataagggcaacagtggcaagtgttagcacttagtatccagaactgtgatggtgcaaaccaagctgcagcatctcctgcttggcattagcaatcacatctttgccaacccagttctgtaattttgagtgttgttttagctgtgtagcacttaagttcttcactgaaaaagtgacctcatatcctttctgtaaattctttttctgtttaattcagccagtgttgacttctgctgcttgtagaacttggagtgatgtacgggttgaacctaaccatctaccttcttagttgctggcactcatggagctgagagttgctagagaaaatcagcaaattagacagatcagtgtcattaaaaatttataatcatctatttcatatgcataatcagcattacctagcaatgttatacatttctctagttcactttccagctcactgcgaattatttcttcatattgtctctttctcttttcttttttactgagacaaggtctccctctctcacccaggctggagtgcagtggtacagtcacagctcactgtagcctcaaactccctggttcaagcaatcctcctgtctcagcctcctgagtagccagaactacaagtgtgctaccacgcctggctatttttttatttttttgtagagacggtatcttgccatgttgcaggtctccaattctcgggctcaagtgatcctcctgtctcacccttccaaagtgctgggattataggcattagccactgtgcctggcctactgtctctatttctttttctctttttttgagatggaatcttgctctgtccccaggctggagtgcagtggcgcgatctccgctcactgcaacctccgcctcccgggttcaagcgattctcctgcctcagcctcatgagtagctgggactacaggcacgcactaccacgcccagctaatttttgtattgttagtagagatggcgtttcaccgtgttcgccagaatggctcaatctcctgacctcgtgatccgccctcctcagcctcccaaagtgctgagattatgggcatgagccaccgtgcccagctcttatttctaatctctcatattttcttcttttttaaccagtcataggctttatgcctcattataaaaatggaagctgctgaatgggaattccttcattcttttacctcccaagtctacaaacctatgtgcatctgggactcatctttttctccttcattctgtcaagaccaatcccttcacaggtgctgtaatcattcttttctccccctccccccttcctcctcctttctttttctatctttcttctctctctttctctttgttttcattcatttttcttcaagagatgaagtctcactctgtagcccaggcaggagtgcagtggtgtggtcatagctcattgcaccctcaacctcctgagctcaatagaacctcccttctcagcctcccgagtagctgggactataggtgcatgccaccatacctggctaatttttttatgactttcttgtagagatggggtctcttttttccccctagatggagccttactctgtcacccaggctggactgcagtggcactatctcggctcactgcaacctccgcctcgtgagttcaagcaattctgctgcctcggcctctcaagtagctgggattacaggcatccgccactgtgcctggctaatttttgtatttttagtagagacggggtttcaccaggttggccaggctggtctggaactcctgaccttgtgatctgcccactttggcctctcaaagtgctgggattacaggcgcgagcccacacctggccaagatggggtctcttgctatgttgcctaggctggtcttgaactcccagcttcaagtgatccttcctccttggcctttgaaagtactgggattataagcatgagccgctgcacccagccacattttaaaaactttttgtagagatggtgtctcactttgttgcccaggctggcctcgaattcctcgcttcaagcagtccttctgcctcaccctcccaaagtgctgggattacaggtgtgagccactgtgcttggcctctcctgtcttaaagaatttcttcctttggtttatttcatctttctactaggtcttttccttcagaattcacacttgccctattgtctcccattttgaaaaccctgtcctttgacctgcatattttctgttgctgtcatgtttttctattctctttcacaggcatgcttcttaaaggagttttcagtacatgctatatgtgcttttttcctctcatgaattccttaactcactcctgctataatattctgtttaaccaaaacaaaaccctcttgctaaagttgttgatgtccattagattgggaaacatgggggtcttttttttcagtcctcatcttcttggacctcttagcagcatttgacattgactccttgtgaaacactcttttcccttggcttctgtgacaccgatctttactagcttccatcttatttctctagctgctccttctcattcttcttctttttttttttttgaggcagatctcactgtgttgctcaggctggagtgcaatagtatgatcactgtaaacttgaactcctgggctcaagagaggcttccacctctgaacctaaaggactaggattacagacatgtgccacctcatccagcctccttctcattcttcttcttcttctttctcttgagacagggtctcactgtgtcacccaggctggagtgcagtggtaccatcatggctcactgcagcctcaacttcccaggctcaagcaatcctcccacctcaccctgtggaggagctgggactacaggcacatgccaccatgcccaactgatttttgtattttttgtagagatggggtttcgccatattgcccaggctggtcatgaactcctgggctcaagtgagctgctcacctcagctttccaaagtgagttttataataacttgtacataaataaaagcatactctctatacattgttttgcaggttccttttttattcagtagcacatcttagagctctttctgtatcagtacctatagatctgtctcatattttttaactgctcaattaatttcctaagtctatattgttgtttcttaaaccattcttccattgatgcacatttaccttaacttgttttttctttctttatacatggtgctgcagtaactatctgtatgcatttttgtgtgtgtacatgtagaagtgtttctctaggatcaatatctaaaattttaattttgggatcaaagatagccttttttttttttttttttgagagttttttgagactctgtcacctgggctggagtgcaatggcacggtctcagctcactgcaacctccacttcctgggctcaagcaatcctcccatctcagcctcctgagttagctgggactacaggtacacgctgccacgcccagctaatttttaattttaattttaattttttttttttgagacagtcttgctctgttgtccaggctggagtacagtggtgtgatctcagctcactgcaacctccgtctttcaggttcaagcgattctcttgcctcagcctcccgagtagctgggattacaggtgtgtgccaccacccctagctaatttttgtatttttcatagaaacgaggtttcacggtgttgcccaggatggtcttgaactcctgacctcaggtgatccgcctgcctcggcctcccaaagtgctgggattataggtgtgagccaatgtacctggcccagctaatttctgtgttttttgtagagatggggttttaccatgttgcccatgtgggtctcaaactcctgggctcaagcgatctgcccgcctcagcctcccaaagaggcataaaacacagtgcttggccgtgttttaaactaaatgcaaaatgccatgttgtctttaaaaatgtagtaccattttacatatcagctaacgatacacgaaacaactctttcaccatacatttaccaatactgagtatttttccatctttgggggaaagtcttttactggtctttttataatatctgcattcttctgacagaatgaggctgagagtattttcatgcatatattggcaatttatattctttttcttgtaattccctgttcatattcattaacaaattatttattgattgactactgtatgccaagtgctggggatacagcagtaaacaaaacggataaaatctctgccttcgtattggattttttttttcatgttggttttaggaattctttatatattctggatattaattatttgtgtatatgttgcaaatattttttcctactccatttcttgtttcttgtaacattgtttattattttcaaagtttttataaacttggatttaccagtttttttcctttttggcttcaacattttgtgtcttagaattgcctttccaaccccaaatttataaacaacatctgtgttttcttcacctgtttatatggttgtatttattatattttggtcttcaatccatctggaattaatttttgtttgtaatgtaaaatagggactatttgtaatatgagatagctctatttgttcccaaataaaatatattttacctttttctggtttgttctctgattgtttctttaacttgtctttcttaactatttttctttcttaactcttagtttacatgtagaagaaacttgtgattgaagactgtgcctatttattaacgcaaatatgacactaaaaattagcatcctgatactactgatttagtgtttacggtgaattattcatagaaatacttgctattttagcgattttttttttttgtttatgtagattagtttatgttttgacggaaattggagccccaatgatatctcggatacatgtcctatgcagtggtagcctacagagaaactcatcttctgcattatactaagttagaaaaatgtgatactgtgtggtccttttccaaaatgacactttattaatattattattctgagacagagtcttgctgtgtcgcccaggctagagtgcagtggcaccattgggtcactgcaacctccatctcccgggttcaagcaaccccagcctcccgagtggctgggattacaggtgcccaccactgcacccagctaattttttttgtagtttttaatagagacagggtttcaccatcttggccaggctggtcttgaactcctgaccttgtgatccacctgcttcggcctcccaaagtgctgggattacagatgtgagccaccacacctggccaattattatgattttaaggccttgtcaggaattgagtatgtgtgatgaggctctaggacgaaaaatttttcccgggttaggtaggtgtggtcacctatctttcaaagttgacattaactgcgttagcttaaagaagaaattcttttcctggaaggcaaataaagattcttcttcaacaaagctttattggatatacagctcaactgagtctagtcttgggtcactgagctcagggaggtagaaatggaataggaattgtactaccttaattcatgtctttcatttctgtaagggagaaaagatgattggcctaatgctattttttttatgaccgatgctagactgtattagagaagtaacttaactgcttctggatatttgcctaataatctccctaatacattgtgagcttcttttttgcaaaaaccgtttatttgttgggtgtcaaatactgctaagtgctagagttataagttagcaagataccattcttgccctccaggagaggatagggaatgtagacacagaaataactaaatacagtgtagtttgatataagcaatactggaaacaggaattgtagtttgaagaggtcagcactgaaattgaggtgaaacccaagaggtttcaccatgtgtcagaacctctgtggccgggcgcggtggctcacgcttgcaatcccagcactttgggaggccgaagcagcagatcacttgagctcaggagtttgaaactagcttgaccaacacagtgaaaccctgtctctactaaaaatacagaagttagtcaggcgtggtggggcgggtgcctgtaatcccagctgcttaggaggctgaggcaggaaaatcgcttgaatccaggggtggaggtggcagtgagctgagatggcaccactgcactccagcctgagcaacagagcaaaactccgtctcaaaaaaaaagaacctttgtgaggtttccttgttccagctttacaagtctagaaattcacatttttgtgcaatcagggatcatttacctgttaggactggctcagactaaccaaaatcatgggagactcatatttaaaacaaaatggtaactcttaatttacagtcatgtataacactcaagctaatctgataaacgtgtaaatcagaggatattctggaaaatctatatgggaggtctaattatagttagagacagtttattaagtttggaatcatttagatccttgctattcaaactgatccttgcttttcaaaccagaagcattggttatcacctgggagcttgtgagatatgaacaatatcaggtaactctggctctgtactagcatatatctgtcagaacctcaattttgtattcgttgttgagtagatgttggcttagcaattagtctcatttcatgtttctcatttttattaattttttttttttttttagagatgggggtcttgctttgatacccaggctggagtgcagtggtgctggagtgcaatggtgtgatcatagttcactgcagcctcaaactgctgggctcaagcagtcctcctgccttagcctcctgagtagcttgggattacaggcccaagccactgtgcccagcttcatgcttctcttttatgaaacctcagagtagaaaagcaagaaaataattttagggttttatggaaaggtggaaacttacagtaaaacctgttataagacttataacaaaatactcaatagacacaaagacatagaaaaataaacaggcacagatatatagagacagacacaccgagacccagagggagagttacacacagactccctacacacagagacacttcccccatatatacataacagaacccctgccccaccatgcccaagcctctacccagtcccttcccacacacagagaccccatacccacagagagaaccccacggctggccggacgcggtggctcacgcctgtaatcctagcactttaggaggctgaggcgggtggatcacctgaggttgagagttcgagaccagcttgaccaacatggagaaaccctgtctctactaaaaatacaaaattggtcgggcacatgcctgtaatcccagctactcgggaggctgaggcaggagaatcgcttgaacccgggaggtggaggttgcggtgagccgagatcgcgccattgcactccagcctgggcaacatgagcaaaaaaaatccgcctcaaaaaaaaaaaagaatcccatggccatctccacagagagtcttctccatggttacagagacaccccacacaaaccacacacaccctgagacccacccacacacaaaaacacgggctcccacagagagaaatacatacacagacacacacactgacatccaacaggtaatgcttaaaactaaggttttcatggagcgtgaatagtgttctccacagttattttgaggagaaggagcaagtgttctctcaaaggtacttttaactgagccagaaaatgaagcaaaaacagacgggctgccattgggtctgcagaacagtgaatgctacaaagccagtttgatttggattcctgtttctggaactgcttgttcctgggcattgttttcagtttgatgcactcagcatgcttaggtggaaagtcattctcttattttctctcaggagcttgcatcctagattgctggttaagcagagttttatgctcagtctcctttggcactaattaacacactcccttggtgctccctgagtcatataagtctgcccaggattggaagatccagaaacactgtgcccatgtggaggaactcatactgagtcctctgtgggtgcgtgggaccgaggaatgtagggggaagattatgtattagatatagaaagagatgtaattttcatttttttttaacctgtgggtcattcatggtataggtttgcgtagagagcttgatggaacttaagaatgacttaggaattatttagttgtaaattaaatgatttttaagctacattaatgtgggcaggggatggcgctttggattattttggttgagagagaacactgaaactacatagccagatttcttgtgactcgggcagcatcttctgagaattatcttgttaggaaaaagagttgacacatgcagcatgtttgtgtgtgtaaatacttgaaagtttctatcacaccaagggagccagacaccagagacatcagaatagttttataaacgttaagttccaaaaagaactattttctcttgttgcctggcacacgtatatgtattcctttgactaaacctgtttaatttcaaacaggctaggcatggtggctcatgcctgtcatcccagcactttgggaggctgaggcaggtggatcacctgaggtcaggagttcgagaccagcctggccaacatggtgaaaccttgtctctactaaaaatataaaaattagccaggtgtggtggtgtgcacctgtagttccagctactcgggaggctgaggcaggagaatcactttaactcgggaggcagaggttgcagtgagctgagactggccactgtacttccagtctgggtgacagagtgagactccatctcaaaaaaaataaaataaaataaaatttcatttcaaatagatggaagagtcatgagaaaagtgtactcattatccagtttaacaaatgttttcattttgcaaaatttctttattttttaaagatgtaaaacattggataaaattgaagacgcagctggccacagtggctcacgtctgtaatccctttgagaggccaaggtgggaggatcagttgaggccagaagttcaagaccagcctgggcaacatagtgagaccctatctctattttttttaaaaaagggagacagaaaaaaaaaaaaaagaactctgtgtattccttctctattcattctcctttatcccttctctccttcccataaggcccacaaaggtaactttgtgtttataactccccttcatgtttagtacttttgctatatattctttatcagtatcaattgtatgtcagcagataatatatagcattgttttgtttataaactttacataaatggtatttatgtattctgcagccctcttttttacttaactttagagttttagccagtttgatacatgtagattttctaattgatttaactactatgtggtatttcacatgtatgaatatactacagtttacacattcatctcactgtgttgcccagtctggtctcaaactcctcctggactcaagcgatccctcctgctttggcttcctaacgtgttgggattccaggcaggagccaccaagcctggcctttttttttttttttaactgaaatgaacaaccttactcatgtttccttatgcacatgtgtgagagtttctccaggatgtatctctagaagcaaaattgcttatggtggccgggtgcagtggctcacgcctataatcccagcactttgggaggccaaggggggcggatcacgaggtcagaagtttgagaccagtctggccaatatagtgaaaccccgtctctactaaaaatacaaaaaattagcggggtgtggtggtgtgcgcctgtaatcctagctactccggaggctgatgcaggagaatcatgtgaacccaggaggcggaggttgcagtgagctgagatcgtgccattgcactccacctgggtgacagtgtgagactctgtctcagaaaaaaaaaaaaaaaaattgcctgtggtatgttaatttatatcagcttgacaagatatttccaaattgctttctgaagtggcttgattcctgttttcaaatccttactaatatgtggtgtcgtcagacattaaacttctgtcaggtagtatctctgttgttttaatttgcatttccttggatagtgagattgagtttcttctaatatgtctgtagttcatttggatttccttttttcatatcctttcccatttttctgttgggatcccagtggcgttttcttatcgactatattgtttctcttttttttttttttttttttgagatggagtctcactctgtcgcccaggctggagtgcagtggcatgatcttggctcactgcaacctctgaagcccgagttcaagcaattctcctgcctcagcctcctgagtagctgggattacaggcgcctgccactgtgcccagctaatttttttttgtatttttagtagagatggggtttcaccatcttggccaggctggttttgagctcctgaccttgtgatccacctgcctcggcctcccaaagtgctgggattacaggcgtgagccaccatgcccagccgactatattgtttctaattccttatcagatatgtgtgtgtgttgaaaatatcttttggtctgtggcttgtggctttacttatgacttttattaaaaagttaaaaattttaatataaaattgattttttaaaatcatttgtcctttttgagtcttgttttagaaacttgtacctatcctggggtcatattttcaatatagtcttctaaaatgtttagttttgtgttttcagttatgtcttttgtttgtttttgtttttgttttgttttgttttgttttgagacggagtcttgctctgtcgcccaggctggagtgcagtggcaccatctagactcactgcaagctccacctcctgggttcacgccattctcctgcctcagcctcccgagtagctgggactacaggcgcccaccaccacgcccagctaatttttgtatttttagtagagatggggtttcaccgtgtaagccagcatggtcagccaggatggtctcgatctcctggcctcgtgatccacctgcctcggcctcccaaagtgctgggattacaggcatgagccaccatgcctggccttcacagtcatgtctttaatccaactgaaattaatattttatatggtatgagatagtgatcttattttattttattttattttatttattatttttttctttttttgtgcttttttttggtggggggacagtatcttgctgtgttgcccagggtagagtgcagtggtgcaatcatggttcactgcagccttgaactcctggactcaagtgattcttcagcctcagccttccctgtagctgggactacaggtgtatgggccatcatgcctaattcatttttttttttttttctgtagatacagagtcttgctatgttgcccaggatggtgttgaattcctgggctcaagcaatccttcaaccttggcctttcaaaatgctggaattacaggcatgagccactgtgcctggccttattttattttccatatggataaccagttgtcccatatgtttccatatggacaaccaattgttgactgagtatgtcttttctctgtgatacgtgtcatagtccactcaggttgctgtaacaaaaataccatagatagggaggcttataaacaatggaacttgctttctcatggttctggaggctgggagtctgagatcagactggtgatcagattcaatgtctggtgtggcctagctaactggttcatagatgacagtctttttgctgtgtcctcacttgggggaagagggaagggaattctctgggaccctcttttatgagggcactaatctcatttatgaggactccaccctcatgacctaatcacctcccaaaggcctcaccaccaaataccatcacactgggggttagatttcaacatacgaatcttttgggggaacacaaacattcagtctagggcaatatctaatgccgccttctgatatccagatcctttctgtttctggattctcccttttgtttcactggtgtctttgttgatgtctttaccaattgcatgctttttaaattgttagaactttataacaactcttgatattttggttgggcaagttcttcctaatgtattccttattttaaacagcaagaggtaaaatttgcgtagtgtaaaatccacccattacaaattacaattcaatgatatatatttgtagaatattctttttttttttttttttttgacagagtctcactctgttgcccaggctggagtgcagtggcacagtctcggctcactgcagtctccgcctcctgggctcaagtgattctcttacttcagcctcccgagtacctgggattataggcgtgtaccaccatgcctagctaatttttgtatttttagtagagatggggtttcaccatgttggtcaggctggtctcaaactcctgacctcaggtgatcgacctgcctcagcctcccaaagtgctgggattacaggcatgagccactgcacccggccagaatattctgtttatggtaaaatatatataacatgcaatttaccattttatacatttttaagtgcatagttcagtggcattaagtacattcacactgttgtgcaaccatcactactactcatcttctgaagttttttcatcttcccaaaccaaaactccatacccattaaacagtaactctccattccttcctcccccagcccctggaaatcaccattctattttgtcttttatgaatttgacttctctaggtaccttatataagtagactcatacagtatttttccttatgtctggcttatttcacttagcataatatcttcaaggttcatccatgttgtatcacatgccagaatttcattcatttttcagggtgaataatattccattttacatatacgtaccacattttgtttattcatttgttaatgaacagttgggttgtttctaccttttggctgttgtgaataatgcttctatgaacattgccatacaaatatctgttgaagtcaatactttgagttctgttggttgtatacccagaaatggaattgctgggttatatggtcattttatttctgacgttttgcaaaactgtcataccgttttccatagcaactgcactgttttacatttctatcatcagtgtacaaggattctaatttttatacatcgacaacacttatttcgttttttgataatagtcatcctaataggtgtgaagtatgttggatttgttttttttttttttgagacggagtttcactcttgttgcccaggatgagtgcaatgatgcgatcttggctcactgcaacctctgcctcccgggttcaagtgattctcttgcctcagcctcccgagtagctgggattacaggcatgtgccaccacgcccatctaattttgtgtttttagtagagacagggtttctccatgttggtcaggctggtcttgaactcccgacctaaggtgatccacccgcctcggcctcccaaagtgctgggattacaggcgtgagccaccacaccctgccaagtatgtagaattttaaaatcacctccacaatccagtttcagaacattttcatttcccccagaagtcacttttgcccatttgtggtcagtccctgatcccaccctctgccccaggtaactactgatcagctttctttctgtttatttttatttttttgagacaggatctcgctctgtcactctggctggagtgccatgctgtgaactcggctcactgtggtcttgatctcctacgctcaatcgatcttctcatctcaccttccaagtagctggggctatagttgcgtgccaccgtggctggctaatttttgtattttttgtagagatgggatatcatcttgttgcccaggcaagtctcaaactcctgggctcaagtgatccacctgcctcagcttcccaaagtgctgggactatagttgtgagccaccatgccttttctggaaatttcatataaattaaattatacaatatggggtcttttgtgtgtggcttttccacttgatgtaatgtttttgaggttcattcatgtagtaggttcattcagtagttcctttttattgctgagtagtatttcattatatggctataccacattttatcagtttagtagttgatggacatttagattatatcatcttttagctattttgaataatgcagttatgatcaattatggtaaatcttttggcagacatatattttcatttctcttgggtggatatctaggagtggaatggctgggttgtgtgttacatttatgtgtaattatttcatataaatgtaactggcaaactgttttccaaagcgattgtatgatgttagattcccaccagcaatgcatgaatgtttcattttctttacatccttgccaatacttggcattgtcagtctttttgatgataaccatcgaagcagttgtatagtgctatgtcattatggttttaatttgtgtttcctcatgactaatgatgttgagcatgtgcttattagctatttgtatatcttttttgctaaaatgactgtttacatcattttcccatttttaattgggttgttttattattgagttgtaggaattctttatacagcatgttctgaatacaaaagatttttcagatatgtgatttgcaaatactttctcctagtctgtggcttgtcttttcattttcctgatgatgtattttaaagagctaatctttttaattttgaaaaagtccaatttactactttttaaatagattgtactttttttttccccccaagacaaggcctcattctgtcacccagtttggagtgcagtagcatgatcatggcttactgcagccttgacttccctgggctcagatgattctcccacctcagcctcctgagtagctgggagtacaggtgtgtgccaccatgcccagctaatttttctatttttcgtagagaaggggttttgccatgttgcccaggctggtcttgaactcctgggttcaatcaatctgcccacttctgcctcccaaagtgctgggactgcaagcatgagccactgcacttagccttagattctacttttggtggtataacaaagaaatctttgtgtaactcaaggtcacaaattttatctcctttgttttcgtctaatggttttatagtttaggttttgcatttagatttttgggcttggggtgaaaaaagtccccattttttcccttcatatggatatccacttatcccagcaccattagttgaaagaactatcctttcctcattgaattgctgtgatacctttgttgcaaatcagctgtctgcagatgtggaggtatgtttctagactttcttctgttccattgatcagcttgtctgtcttgatgccagtacagcactcccctgatttttgtagctttattgtaagtacagttatcccttggtttccttggggaattggttccaggaccctcatggatataaaaatcctgggatgctcgagtcccttatataaaatggcatagtattgcatataacctgtgcatatcctcctgtatacttaaatcatttctacattacttacacctaatataatgtaaatgctatgtaaatagttgttacactgtattttttatttgtattactttttattgttgtgttgttactattttttctttttttcttttttttttttaaatatttttgatctgaggttggttgaatctgtggatgcagaacccatggatatgagggctgactgttggaattgggtagtataaatcctggatactatttttttttttttttcaaaattattttgggtatccaagtcctttgaatttccacatagattttaggataagcttgtcaatgtttacagaaaaagcttgctaggattttgatagggatttcattgaatctgtaggtcaattcgggagaattcccatcttaatgatactgagacttctgatacatgaacatggaacttctctccatttatttagattttctctagctgctctttagcagtattttgtactttacactgtataggctattgtaaatgaaattgttttcttgattttactttcagattgtttattgctagcataaacaattgtaaaaatacaattttttaaaattgtggtaaagtttactaacaataaacttttttttttttttttttggagacatagtctcacttcctcacccaggctggagtgcagtggcgcgatcttggctcactgcagcctcaacctcctgggctcaggtgatcctcctactgcagcccccggagtagctgggactacaggcaggcaccactgtgcctggctaatattcatattttttgtagagacaagatcttgccatgttgtccaggctagtgtcgaactcctagactcaagcaaccctcctgtcctggcctcccaaagtgctgggattacagacatgagctgctgcacccagcccattttaaccattttaaagtgtacaattcattggcattaagtacattcacaatattaccattaccactatctatacccaaaactttttcattgcctctaacaaaaactatgtattaaacattatcttctttttttttttgagacggagtcttgctctgtcgcccaggccggactgcggactgcagtggcgcaatctcggctcactgcaagctccgcttcccgggttcacgccattctcctgcctcagcctcccgagtagctgggactacaggcgcccgccaccgcgcccggctaattttttgtatttttagtagagacggggtttcaccttgttagccaggatggtctcgatctcctgacctcatgatccacccgcctcggcctcccaaagtgctgggattacaggcgtgagccaccgtgcctggcctaaacattgtcttcttttccccggtcccccagcccttggaaacctctattctattttctgtctctatgaatttgcctattctgggtaccttttctttttcctttggtgtctggcttattttacttggtataatgttttcaaggtcccttcatattgtagcctgtattagaatttcattctttttaaggccgagtaatattctgttgtttatccattcatctgttgatggatattatggatatttgggttgtctctatattcttttggctattgtgaataatgctgttattggggtacaaggctggacgcagtggcccacaccactcccaacttctgggaggccagtgtgggagtattgcttgaggccagaggttgagactagcctgggcaacttagcaagaatccatctcttccaaaaaaaaaagttagctgggcatggtggtgtgcaattgtagtcctagttacctgggaggctgagttcgaggccacagtcagctattattgcaccactgcactccagctgggatgacagagtgagaccctgtctcaaaaacaaacaaaccaaaaagttggtatgcaaatatctgttttgagctcctgctttcaattcttttggatatatacctaagagtggaattgcttgattacagttgattattgtgttgatcttgtattctgcaattttaataaacttgtgtatttagttttttgaagattctttaggattttctttgtacaggatcatgttatctacaaatgaccattttacttcttcttgtccaatgtatgtgcctttaatttcttttcttttcatattacactgtctagaacctccagtacaatgttgaatagaagtggcaacagtggacatgtttgccttgtttccgattttagaggaaaagtattcagtctttcatcattaagtgtaatgttcactgatagttggtagggcagatttctcctaatatatcctttataatgtcttagttttggctgactaagggactgaataaattggcatgtgttagtgaatatcacctcttgacatttatatgtctcttagctaagctataagattaaaaatccctttcttccttgtagaatggagcaacccttatgataccctgtaagtttctactttgagtccttcagtttttgaattagtcaaattactcatctaaatttgcagttcatggtctgcttgtccatattaaagtctagggtgtctagattgtgaccaaaaccggtgaagcctttgtgttttctgatgctgttttaaagcttattataattttcccttctatggggaaagattctgtgctgttttctcttaaagtgaaatgtatgttgttgtgtgtttttaaatagatgtagtttattttacagtccaaacctgttgtttcatctattcccataagatccacaggcagcatccttctccatttggatggggacagtgaggtttatataccttgattggtaagcctgtgtctgatgttttaagtgccttatcccttaaattgtaaactctacaggacttagaccatgtgtgtcttgttcactgtattgttaacagctggcagatagtaaagatttttttttttttttttttttttttaaataagagtgattaaatcagtttgttttgtgatgcttgtgtgaagagaagtgattagtgtaaactggctttgctttagggttttcattctctaaattcttgaagcattctagagtaggaattgttgtctatttagtttaaacaggatttttttccagtttcttcttagtaattaagctattactaggtttattattctcttacatgtgtgcatttaaaaaatttgaaacacatctcgcctcctttacagtttggtaaaggctgccttggcgtcccaaagtggtgagattacaggtgtgcgccactgtgcctggccagctgaagtttttgattcccagccttattctctgtctttgcacctcagtgatgctccagtaagcatcatctgtttttctcaaactgcttgatataatggtaactcatatagtttgataatgaggatatctaaaaatgattatttccagttcaaatacgtccattaatctgcatgcttaatcctaatttttttcttgtcacactgccttctgagttattatagtggcttatacattttatggtttctagaatctttttgagtgagaatcattgagaatatttgtgtttttaatctcttctgtttatctcttctgttgatgtgctttttgttaattatttggctggcttttagtggatcttgcacaatttaatgctggcacatgataagttcataataaatgtttctgattatcgagctgagccccagtcatgaaccattgatttctaacatactctctccctttagcaacctggttacctctgcccttaaatgaacataacccctgatgccatgacatacatggagacttcagtattaatttttcagttcttgtatgtaacactcttaggtagagtctctgtcagatggcactgataattaatcctttggaaagatcccaagggctttcaggctctctggctagatgttaacaacaggaacagtgagtagtatatagcaacatgatacttgacagttttaaagcaacactggttttatttaagatcatcgggttaaaccagctaatactcctttggcttaaaacctacttgtagtttttactgtttggtattctcttctcagaattgttctttatatatgtagcagaggctgcacgtgatggctcacctctgtaatcccagcactttgggagggtgatgcaggaggattgcttgagcacaggagtttgagaccagcctaagcaacatagtgagaccctacctttccaaaaaattaaaatattgtctgggggtggtggcacatgcctgtaatcccagccacttgggaagttgaggtgggaggatcacttgagcaaaggagtttgaggctgcagtgagctatgatcgtgccactgcactccagcctgggtgacaaagcaagaccttgtctctgattgattgatagctaggtaggtaggtaggtagatagatgattgattgattgattgattgatagataaatagatagcagagatcatgacaagtctgtgtcccacttgaagattagaagactcagcaggtgggctcttggcttaaaaagaaggcaaaggtagccgggcacggtggctcatgcctgtaatcccagcgctttgggaggctgaggtgggcggatcatgaggtcaggagttcaagaccagcctggccaagatggtgaaaccctgtctctactaaaaatacaaaaaattagccaggtgtggtggcgggcgcctgtaatccaagctactggggaggctgaggcagagaattgcgtgaacccaggaggtggaggttgcagtgagccgagattgtaccactgcactccagcctggccgacagagcaagactctgtttcaaaaaaaaaaagaaggcaaaggtgataggtgttttgggactcacagtcagactcatgaaggctttgtcccaatcttgagaagaagaagggacccttaggaagattgggaccttgccaagacgtagcatgtagcagagtatcgaagaatactctttttagagcacttacaaatatgaattaattcttacggtagcactgtgataagcaattgtagtttactaatggcaagaccaaataaagtgaaattcaattaatgtttgttaaatgacgttgagcactatacttagtgcttgtccaaggcttcagagctgtaaatgcaaatggcaaacactgtattttgctaagacagcacctcagtttctctgtctgtaaatataatcccagagttataaggttgtaattaagaaattattttttatttttgagacaggatctcactctgttgccctggttggggtgcagtggttcagacacagctcactacagcttcgaccttctgggcccaagtgattcttctgcctcagccttccaaagtgctgggattacaggcataagctgctctacctggtcaaaaaatattcttcttgaatatttagagattagaatgcaaatgtttcaaaatatacttgtttaggttttcatgtttcatgcattttcaaaggagtaaaaataattacagaaaagagaaacaaatgtagtttataattatatcttttctgcttaactattatgatttagttaatcaaacacaaggtaaaaagctgaacttgaattcttgttctgtagtactttaaccaagtgtttatttcacaaaatcaaaatatgagcacttggtttaagtattacagaataagaattcaagttcagttttttacctgtctttgagatgttagtataacatctaaatgaagatgtcttgcagatagttagaactggattcatagtggaagtggggaagaaaggatcaagaaatagctttggaaggtatcagaaaggtcccaatcataatggtagctatactttgattgatatggaggacaaagatggctaattagagtaccttaggtacaaagcaccattaatggacagaaagaagaaaaggtattagcaaaattacattattatcctacaacaacataattttacctttgtgtaactgcttatacctttcaaaccagtaatatccattatcttacttgatactgaaatagtttgaaataaagcaggtgacttcttagtacaacatgttaattttagagaaactagctagtactgttttttctagaaactctgattatattataaagacaaaacctagatactttacattgaattattttgtacttgattggtacattgttaatatttttcaaagaaatagcaattttgttgaactagagccaggtctcaattttctctctggctttctttgtggcaccatactcctgtaaaaccatcaatgctcattaagctgtggatcactttggcttttcttaacctggctaaagcagtgttatccacaagtttcatttcagagaagatagaactttgtaaataacctgaaggcacctttatagctacctttctattgtctctgagggtaggtcacaggctgtgatggggaagaagaaaagcgttctgaggtttgagaaaaagtggtgagaatttgaatagttttttgtggagtgtgagcaactgaattaatcagaaatgtggtaggatttctgaattaattagaaagtaaagaattaaattttctaatagtagctacattaaaagtaaaaagggccgggcgtggtggctcccagcactttgggaggccaaggcgggaggatcatgaagtcaggagttcgagactagccttaccaacatggtgaacccccgtctctactaaaaatacaaaaattagccgggcatggtggcacgtgcctataataccagctactcgggaggctgaggcaggagaatcgcttgaacctgggaggtggaggttgcagtgagccgagatcgcgccattgcactccagcctgggtggcagagcgagagtctgtctcaaaaaaagaaaaaaaagtaaaaagaaacaagtgaaattgattttaatatcttatacttaacccagtaaattaaaaagttattattttaacatatcaatataaaaattaagatatctttttaattttgtacttgagtctttgaaatctggtgtatattgtgtgttgacagtatatctgaatttgactagccacatttcaagagttcaacagtcatatgtggttagtaactatctattggacagtgtgggtcgaaagtaattaaaaataaattttgaactgcatagacacgtcatctatttacatgaatgtgtgtgtgtgtgtatgtgcgtgtgtgcgtgcgcacgcgcatgtttagcaattcttagggttaagacaattcatttgataggcctgggttgatgaactcaacggaagttgatgtgaataaaaatgaaaatgagggcttggcgcggtggtccacgcctgtaatcccagcactttgggaggccgaggttgggagttcaagaccagcctgccaacatggtgaaaccctgtctctactaaaaaaaatacaaaaattagctgggcctcgtgggaggcacctgtaatcccagctacttgggaggctgaagcagaattgcttgggcctggaaagcggaggttgcaatgagctgagattgcaccattacactccagcttgggtgacagagcaagactgtgtctcaaaaaacaaaaaaaaaaagaaagtgagattgagttcaaagggaagtcattgcaaggaggcagtgccagtactaaacttaatacctccgtcctgtgtagacacatccactttgttgaatggaaagctggcctcttactacccttcaactactttattttttctgatgacttgtaataaataccgtctacctggaagtcagtgtgttacaattagaatgtgaggattagaagaaactaatataggtaggactaggaaaaaataataggttagagtgataaagtaaaaattttaagaatacatgcaatagtataaaaatcaaaagatataaaaagattatgtatcaaatataaagctcttatcctctagccatctgattcccttccttgagagtaactagaatagtttcttatgtcttatttatcttttaggagtagcctatgcatttacaagtgtatacatacttttttgtctttccttgaataaaccaataaaatacttatatccttttgaaaatatacaaaaggtagcagcatacaatacacaccatttaccattttacatcttgcttcccgccccccaccccccaccccccccccgccttaatctatcttgtagctgctttgttgtttttaaagtctatataatatttcattgtatggatgtaccataatttatgtaaccagttttttattgttggttatttaaattgttttcaatattttgcccttacaatcaatactgtaatgaatatctttgggtatatctgttgaacacctatgtgaattatgtggaataaattctcataagtagaatttcttgttcaaaaggttttttttttaattgtataaatattgccaaatgcaatagaggtttttaccagttaacacttccaactaataatgtgtgaataaactttttcttaaataaaactgattctacaaaccgagtcttaggagaaaataaaatttataaataataaaatttttattgtgctgttgaattgaagaggcatagataacccccttttgtcttgacatgatccttttgagcaacctcagaggagcccctagagttgcagaggcatagactgaaaacaccgataaccagctccctttattttatctatgaagaagagagctctgaagggatgaagctgttcctccaagaccacccaaaaaacagaaaaacatgaactatagaaccctcagataggaataggaatggcttggaaatgtatgcagaagtgttttgtgtaacaggtaaaccccaattaattactttttgagaatcaaacctttttaaaataacatttgctgtttgattttgttttagtaagcttcatggttagtggagccttggcagcctaagggatccttggagtggaaaagggaacttggtggtcagagacaagggaggaagtcctaccttcatatttctgacatggtgacaactgatatgaagagcaaaaggggcaaagactagcagaagagaatgaggggtggaggggcaaaagggtctcaagtacctacccagtgcctggtgcatggtggctgctcagtaatggtagttccttactggtggaagtatggactggtctgaccattttgaaggatggtacttaatcagattatgcattatgtataccttgtaacccagcaacttttttcctgtatatatacgtgaaagaagttctcacacaggttcataaggggtcattcatttcagtgtatttgttcttgtggaaagtaatttgttgtccataccctttccccagtgatgggtaaaatgtgatcatagatttatacctcagtttgaagtaatggtctagatgtgcacatggcagcctaaggatcttagagacatagtgctgagtaacaacagaaagaaaaggaatgagatatgtaacacaatagcatttatatacattttaaaatgtatgtaagtaaaacattacatactttacaagaaaacatgttaacacattaaacacattatagtgattgcctgtgttgtggatgataggagtggaataaaagaataagcaaataagagtaaaaatacacaaatgtaaaacttcatttctgtatggaggtgatctttaaagcatctgttggataattaggaggacacctacagatcagtacccctgtgtctcccattctcccattgtggttacctttgggagtaaaatttctggtaacgaattaccattggaatattttttgttgttaatttaactgaaagtaaatcagattcacagttctcaatttttttttttttttgcctttaaaaggaaaaaaaaaaagaatcccccatccttcactttttctgttactgtgtattctgttggattgttgcttaaatacaaaatactaaccttatgcctaatttaggtactacgtgtataccaggactacatgatatccttcttagaagataatacttagtgacattaataattcattgggagacttctccatgttcttttagataattgccttttctgattaaagcttggaatgccaatagttggaataaagcagtcacttctttgatctgttacccattataaaatttatgttatttatcttgctttttttttttttttttttacaagaatctctgcttatagcagataaaaatactgactgacttccagagagttccctgagataccaggtaagatcttggatagaatggagtgtaggaaacaaacagttcctatcgtaagcaatttttgttgctagaacaaaatccttttgtaggtcatgaacttttgagtagcctgagttttgagttagcctcaattaaggtttttggttgttttaccacccaggctccagattagcaactggagacaggagctgtgatggaattaaagtaaccgtggcaaccattataatgtaaatgagccttcttgggcaggaagttgagagcgtgagcacttgttagggcattcctttattacatctacaactagagctgagtagcattttgctattttaaaatcctgctccttggacaccatcaagtcctgtgttattccaaccttcttttagttttctgagaaactaacaccaaactaatatgtatataaaataggaaatgaatctctggtgtgcctccttcattcacattaagacctcttcttcctttaataacattacctttttcccactgcttctggcaataacactcagcaccaagtctctgataaacaaagaaggccacttaggttttgagagatgtggtgtgtacctagtatactctgatggccaagatttggcttatggtggaacaagtggtgccagggccccttcttaagcagcacaggagcgacaaatctttggtctcaaatcttaattttttatattagtctttaaaattttaaattattttaaaatttttttcaataagtcttttgtactcctaacctttgaatttcaagtcataagattgtaagttttagagtattaatgtaggcttactctttgtggatttagagattagatgactggaggagaataataaaagtgaaactgaagtaattaccaaatgaggttgagttctaagttaagtactgtacttgtttactaccccacaatgagtccagtgattttaacaacaaggcttgtaagcgagaagcttaaggttcctattcaaggttaactattgttatgatgttggtgctaggaaaataacttccctcaacctcagtttttctctttgtaaaggaagagtgaaaacgacgactcactctgttgtggggaaatacttacaaaaggaaataaaatttaactagtagtatggtcaagaatgtcagctgaggttggccaggcgaggtagctcacatctgtaattccagtgctttgggaggttgaagcaggcagatcatctgaggtcaggagttcgagaccagcctggccaacatggtgaaaccctgtctttgctaaaaatacaaaactagctgggcatggtggcatgtgcctgtaatcccagctacttgggagactgaggcaggagaatcgcttgaacccaggaggcgaaggttgcagtgagccgagatcatgcctttgccctccagcctgggcaacgtgagtgaaactccatctcaaaaaaaaaaaaaaaaagctgatataagacaaattctgatttttaaggtaatgtgccttagttatgcctgcttagcttgtgccagttaaggctttttactttgattttaagtttccttcctcctacttcatccttttgttgagttgtcattcagatcacaacagatactcttgtataactgtctttgttggcttagtcttcaacaggtggattgatcttggacttcaaatatttgagcatttactatatgcaaagcttggaactgggtgcatagggaataaatataaaatgtatacaagtgtgattcctgcccttcaatatacaatcattcaaatacttgtagacagttctgctcttacttttcctaccccagatagtctcttctccatggaaatcattcctgcttctcttaatcattcttcatatgatgtagtcggccaggccattactaccatcctggctatcagcatcacttgtaagaggtcatgtttcaaattataattctcagggtgttgcttgacctgtttcatatttcaaattataattctcagggtgttgcttgacctgtttcaattttcttccttgttcaggtcactgtactgttattttattacctatgaatttgtattaacttttaagctgtcaattcagtacaaaggcccaccttgagcttacagtcaactgaactctcatcaacacatgttaaaattggtttcaattttttttttttgagacggagtcttgccctgtcacccaggctggagtgcagtggcacgatctctgctcactgcaacctccgcctcctgggttcaagtgattctcctgcctcagcctcccgagtagctgggattacaggcgtacgccaccaccctcggctaattttttgtatctttagtagagacagtgtttcaccatgttgggcaggctggtctcgaactcctgaccttaagtgatctgcccatctcggcctcccaaagtgctgggattacaggcgtgagccaccgtacctggcctgaaatggatttcttattcgctgtatacttctaaaaaataaatgcatgtatatttacccttgataaattttattttgtattttcagcacgttgtttctatatgttcagatatttgatcttttataatctttaatgatatctcttatatctttaatggtattatttaatctttatagataggtttagatcaccagaaaatttataagctaccatttaaatcttcacaatattgataaacatctactaagataaggccaaatagagagttctgtggcaactgttagttacttctttccagatttacattaaacaattgattaataatcttagaatcgttgttcaaccaattgtaaatctatcacttaactagcataagaaagttaatcttgatttcagcaatatgtattggacctactttatgttatttctctgatctcttagtctaatacttttgtcaaaagtaaaatgaggttagcatgattgtttttcttggtgaaccccattctgactcactgtgttctctgtaccccttccctaccccaccgtaggctaacataggaaatctttgttaaacccttaatctatgatttcaataatctagtctctttttttcctttgaaattgagaaaattaaaattgcactttattgtttctagtcttctagcttctcttccatttttcatgagagatcatggagatcttaggctgtaatttatctggttctagatatttgcatttactaaaagctactgggtgctcttttattatcttttctcctatttcaggcttcagtttcctcttaaccatttgcattctcttttcagtatggaaagttactctggataaagaaaatgcaagcaaaataagagttgaataggtttgattttctgtattattttttaacatggtagaagggcctgtctcatatttttgcatataacatcactgaaaaaagactatatgtttgcacttttcataagcttatattgatattctattatgtgccaggcactgcattagattcttgggctccaaatataaataagatatggtctctgttctcaaggaggtcacaatataattggagagatacgtatttatataaatatttactgtatagcaagagccgctggccaggatcagaaaacatactttgagggttagaaaaataagacagggatttatgctgaataaggtggcgaaatgtacattttcaataagctataggaggagtcatgaatatttatgaaaggagaaacatgtacatgcacagttgagcttcttacccctttatgggttgcatgtacagagaaaaggcagtattagcatgatccaagggtggagtttttgagcctctggcctcaaaaggtgaagcagaggacatgaaaagcctcactgcgcatcctctgtagactggccagaaccactccgtggttggtggtctcctattaggaaggaatgctggttggtggttgtgaggaaaccacaagagggaggggcaatgtcaggaggttggtttatattagcagtggagcaagtaaaaaggctggtttctgtttaacccttaggaaagaagcctaatgctgggcagcaagggatgggtataatgaggtgtgtctgacctttcacttggtcatggctgggaactcagatttcagggcttctctggggtctccttggccaagagatggtcacttcagtcagttggggggcttagaattttatttctcaggaggaacaacattcctttttatgaagaatagcatataataagctgacatgaaaatggagggtaaaggctacctgatgtgtttagaaatcttaaaataatccaggatggttggaatacggaataggagtcccaagaaatgaggctggaggtgggaccataaaagaaagggccttatattctttgctagaatttggactccaggaggcacaggagtatcaccgaagggttttaagctggggatgtgatcaaaaccaagcctgtctagtcagtccttccttatgacatactatataattaagtttagtctgttatgttgtggttacaaacagtccccatattttagtggcttacaataacaaggatttattttttgctcatactgcatgtccattgtgtagctttgttccaagacttaggctagatgctcatatctgagacattttctcttgtattagagataaataaggcatggtagaaccacaccatttctctgaaagtttctgttcagaagtgggatgtgtcatttcctcttacttcccagcgtcattggctaaagcaagtcatgtggccaaacttgatatcaactggaccagttgtctaattctccaccaggaaggagcagtgatttttgaataataatggcatctatttacatgtatcaaattttatttctttgctttccgggattacctgggagcatctggtgactgtgttcccagtgacttgaagtagcttgagggaataaagctagttgtaggcagagaaacgagagacaagaaaatgtcctggcagctttaatttgtttctcttctccctgaggctgtcctggttcctgaaattttcctttgtgtctgtaagctaataggagagtgtcatgatcagatgtgcattttagcaagattacttcagatgcaatatggagaatggggagaatgcattcgagtaaaagcaggaagaacagttagtgccttgtgtagaaagaatttttagtaatctgtttcagatatagaaggacaaactaagggcctggcaatagaaatgtgggattcttttagagttacctctgagtcctggctattgtggggagaaataaaagagaaggaagagagttatgtccaggtaaggcatttgagtagatggtggtgccattcaccaacataaggggtaaaacaggtcagaggagaagatattttattttattttattttttatttttttgagacggagtcatgctctgtcgcctaggctggagtgcagtggcgccatctcggctcactgcaagctccacctcctggcttcacaccattctcctgcttcagcctcctaagtagctgggactacaggcacccgccaccatgcccggctaattttttgtatttttagtagagacggggtttcaccttgttagccaggatggtctcaatctcctgacctcgtgatccacccgcctcagcctcccaaagtgcgggattacaggcgtgagccactgcgcccggccagtagaagatattttagacattgagtttgaggtgtctgtggaacatctaagtggagatgactagtaggcaaattggataaaccggtatcgagctcacgggatgtaaagagtgttattaaaatgatggttcatggaatgtaagggtaagaaatcatggataagaaggaaaggaagaaaggagatgaccgagagattgaagtaaaagaattagtgagctaaagtctgtgaaattatagtagagaaaattaaacaagcaagctaaaaagaagtcagagaacaggatacccaaattagccattatggagatggaacagtttctagtggtgataaggtctggagtaaccttggttgtgcttagctgagttagaatggagcagaacgtcattgaagatgacatcaaggaactcgaaggctaaggtctttatgggccacccacgtggattgttgcttgttcagtgtgacagagactcctagttgtttactcagtatccagtttctacttcttccttactagcagaacgctaggcaatatgcattggaaaaactatacatagaattaaattcaactgcatataacagtaacccccaataacaatgccttatattgtatatgagtttatttttattaaaaaatcagcttcgtttcacattttttacagaatttatggtatttattagattctaacttgagtaagttatatacatgatttattaaatctggtcaattgtaatccagaatgtatgtactgtgttttatttataaagaaatatagagagaaacatttacaagattggtgtgatggctcctccacagggattagagacccagactcctgtcatttttctctccattgttcttagtatgctgcttccatcattagggatgctttcatggcttaagatgactgctggagctcagggcattatttcagcattatatgaagcaagaaggaggaaggggaaaaaggcaaaaagggcatcccagaagccccacccaacaacttccgcttccatttcatctgataaactcaggttgatggtgggatttaggatgactagaatctgagagaggaatttgataggtggcagtaactagggaaagagatgagggagttgaatggcatgaccttaaaggggctgctttattataagagagtgaagtagtattctggcagagtgtggcaagtgcacaggttctgagggggtgtgtgtgggtgaaggaagtttatcagacatttttcaggaattagcaaggaggcacgtgcagctggagtagagtaagtaagggggagagttgtggagattaaggctggcaggtaatgagccagtgtcatgtatggtgttaataggtcatattcaggattatgctttaacttttgctttaaatgagatagaaaaccattggaaagttttgagcaaagaatgacaggatcatatttaagttttgaaaagatcgctctggctgtagggttgagaatagactgaaggggtcaggagaccagttaggaggttactgcaataactagagaagagacgatagtagtttggagcagataatagcggtgacgatgagagaagtggccagattctgcatatatagtagagcaaaaaagatatgctaatgtatttgatgagtgtttgaaagagaaaagttttggatgacttcaaagtctttgtccagaacaactgtaagtataaaaacaatagggagaagttgtccaaaatgaggataattgtattgctacagtgaccttctgtaggtgtaatcagtgtcttcctgttttagtatattcctgtttcttgtctccttttcttttttctcagtgcacatttaactagttttcaatacattcgctattttgctcagccaacaaatgactgttaacaattacaaagttgtttcagcctttatcggttaggcttctttggttgcaaaacaaaccaaaattgactttgttcaattgacttaagcaaaaaaggtagtggatgagaaggagggaggggaaaggataatagaggtaagtcacagaataaggaaatgctaaagaattacaccttggggctgggcgtggtggctcacgcctgtaatcccagttactctggaggctgagtcaggagaatggcttgaacccaggaggcagagaggttgcagtgagccgagatctcacaattgcactccatcctgggcaacaagagtgaaactccgtcccccgccaaaaaaaaaaaattacaccttgggagaaccctgaactaaagtatctcactgagatctagatagcataatggacataatggtttttatcagggtaacgtcttctggacaaatcactcatataattgagtatctaatttaataatggtactgagctagatactgagggcggggaataggaggggcaatccaaagctgaataaaatatattacatacctttggaggattataatagagtagaattaatgaatcatgtctatcacttattcaaattagaatgtaataaataccataaatgctacaaaagatattaaacaaagatgattagatgattttgtatgactaaccatagcaatattttaacattttagatacaaatagattttaaaggaaagatagacataagaaaatgtcagataaattttttttttttgcccactaaacgcaaaatatttatgttgtggagacatagtaaattatgatacattcatagagcataatactaagcagccatcagaaatgatgttgcacaagtatgcctaatgagaaggggaaatgatcattttgttttaagtgaaaacaaaaaaagattatgaaatcacacaaatagaaaatctgaaatttaacatgagtggggtgtgtggtgtatgtatgagagagagtagtacaccctccaagttattgagttcactcaaggggtgtgtgtgtgtgtgtgtgtgtgtgtgtgtgtgtgtgtgtacaccctccaacttattgagttcaatcaagccttattaggtatttttttttgagacagagtttcactcttgtcgcccaggctggagtgcagtggcgtgatctcatctcactgcaaactccacctcccaggttcaagcgagtctcctgcctcagcctccctagtagctgggattgtaggtgcctgccaccatgcctggctaatttttgtatttttagtagagacagggtttctccatgttgtccaagctggtctcgaactcctgacctcaagtcatctgcccaccttggcctccaaaggtgctgggattagaagcatgagccactgcgcccctccccaagccttattagatttgaatgttagcatcaatagtatattgaaggtggaggtgaggctagtattgaaagtgaagagagaataatcaggctattgtaattatctaagtaagagaggataaggacctgaccctaagataggaagtagaaaagagggaatcttgtgggagagatggtaagatgatggaattgatagaatttggtgactgacttctgtatgtgtgtgggagtggatgctctgtgtgataacagagagatgagtttctagtcttatatgattgggtaaatggtcatactcctatttatttaaaagtacctataacatgggagtagaaagctctgaaaatgtggcatatgatctgttttaagaaaaaagaggatgaggggaaatagagagagaggaaagtgaggaatttcttttgacgactttttggacaaacttgctattttagttcactccctttttactcctagttctactaggagtaaacgtagtagtttaaactagtaattagtaatttagtaaatttaaactaataatttccaagtcagaattttaacagtcatgactgatttttaagcctctatgttatcttgaggatcttgtttttaccagctataccttaaagaagctcagctttgaaagggctttgtgacataaccaggttttggaaagatcaaggtatgaaaatgctgtaactttgaaggcagcattagggagtttgcttgtgctttctttttttgtttttgtttttgttttttgagacggagtcttactctgttgcccaggctggagtgcagtggcatgatctcagctcaccacaacctccatctcccggattcaagtgattctcctgcctcagcctcctgagtagctgggactacaggcacgggccaccatacccggctaatttttgtatttttatagtagagatgaggtttcactatgtaggccaggccagtctaaggccagatcctgaccttaggatccacccgcttcggcctcccaaagtgttgggattataggcgtgagccactgcacctggccgcttgtgctttcttgggaacgacattaatgctgtggttgaatctttcctttgtttaaacaaaccaaaagtaagatttgaaggctgcctggtgggctgaatttctcttttggtagaatgttttagctttttgaaaataagtagacctctttactttttaaaagtaactttattgagatataatttcatactgcgaagttcactcatttaaagcatacaattcagtgagtgattttttttcatatttacagagtgtataaccattactgtaatttaattttggaacattttcatcatcccagaaagaaaccttgtagtaatcattccctaggcaaccacgaatctattttctgtctctggacgtttcatataatttgcctattctggacatttcatataaatgggatcataaccatatgtgtagaccttttggctttcaaagtttcttttttttcttttctttttttcctaaatgattcctgtttttttttttttttcacttactctgttgcccagtctgaagtgtggtgtggcacgatgatggcccagtgcagcctcaacctcccaggctcaagccatcctcccacatcagcctactgagtcctactgggaccaccatggtgtgcaccaccatgcctaattttttttttttttgagacagagtcttgctctattggccaggttggagtgcagtggcacaatttcagctcactgcaacctccgcctcctgggttcaggtgattctcctgcctcaccctcctgggtagctgggattacaggcacgcattaccatgcctggctaattttttttttattttgagtagagatggggtttcaccatgctaaccaggctggtcttgaactcctgagctcgtgattcacccacctcaacctctcaaagtgttgggattataggcgggagccactgtgccggttttgttttgttttgttttgttttgttttttaatagagatgggggtctcactatgttgcctaggcttgtcttgaactcctcggctcaagcagccctcctgcctaagcctctcaaagtgtagccaccatatccggccctaaatgagttctttttgtattccgtaatttttagagttcaccttaaattttacagtgtctatagattgataaatttgcttgatacttaattcatgcttatatccttatcactaaatgcataatatatgtcaaataaattatttgtaatggattttttatggacattaaaatatattctttattgatattgttccagtgtctgactttcatttataatttcatattaccatttttgctcctatctactactcactttctagctaaagtgtttatacttacagtgatggaaagtttttgacttgggccttccttattcctgcgtattatttaattttacagtgtttggtagaagcaaggtcaaaagtttactgaaaagaaaatgaagcccattaggagactattaggtatatcttaatatttcctttctcagttcctttagatccttcctcattgtattatctgggtcacactggttgagggattctaccttcctaatgtaacgtcagttgtgtttagaactgccttgacatacgtacctgcttgattggcgtcctcttctattagtcaccagagtacagagatactcagttccaatgataaaaatagtatacattccctttagttagaatcttcttagtgcaaataaccttggacctatgggtcctgtccatgataaaaggcagaacatttttcacttttttctttgagtttctcttcctgtgacttccccctccttgttatatgttttacatttgacaaagggggaaagaacactcaagattcctagtcatatgccagataaatatataatagacattattttaaatctatagctgagcttgtgaaaaagtaaggaaaatccttaggggcaaaaaaatgatgagggcattgaaaatcagtgttaagtacataagctaaagttacggctgctctggatgactaagagacttagttttaacaaccacatgggaataagagacttttttactcccttgcagaaagctaagttcctcaaagggtttccacattattgaaaagatgatctagaaaaaacatttgccccatggcatagagaaatgtcaaggaagtttgtccactccgtgtgggctttaggtgagaaaggtttctctgagaatttgttacctggggttgtcttcacataggttcagtttagaatgttcctctttttctgcagtccaggaaacccaaagccaagaaattaacatataaagtagtcttgaatctgcaacagtcctacggcatcaggctgaagcaagtgcaaaacttctctatagggatatcctcaatctaggccacaccaaatctcacagctaaaggtgctctaaaaaaaaaaagtttgggccgggcgtggtggctcatgcctgtaatcccagcactttgggaggccgaggcgggcggatcacgaggtcaggagatgagaccatcctggctaacacggtgaaatcccgtttctactaaaaatacaaaaaattagctgggcgtggtggcaggcgcctgtagtcccagctattcgggaggctaaggcagaagaatggcgtgaacccgagaggtggagcttgcagtgagccgagatggtgccactgcaatccagcctgggcaacagaacgagactgtctccaaaaaaaaaaaaaaaaaaaagagttttaaaatagaccttcaaaaaatatagtcactgaaacttaaaatttggtggacaatatcaatggtagaatggatacattatggtatattcatagaacagaatactattaagcaatggaaatgaataaattgctgctatgcataagatcatggctgaataacaataatgttgaaggaaggaagccagatgtaaaataatatatactatgttattttatttatataaagctaaaaacccgggtgcgggtaacattggatttttgtcctgggtgatagttacatggctgtttcactctgttataattcattgaatttataatttgtatacttcctccatttaatagaaagcagataaggaaaatgtaataaatgtcatagaaaagataggataaatagaaagcataataaaagatggtagagataaatccaaatgcatcagtaatcatactgaacataaatgaattacacttattgaaacaaagacagattgttgtagcatgttttcaagatggctgatgttagttccttccctccacatgtgcaccacccccatctagtggtggagtttattcctctgttcataccaaatctgggctggccttagtgacttgtttggtgaaatgtggcagagataacattctgggactttcaaggccaggtcatgaaaagttttgcagcttccatctaggcctatttgaacattctcttttggattgctgtgctatggaacatttagtcttggaacctagctgccatgctgtgaggagtccaagccagatggagaggctcagctgagctcctagccaacagctagcatcacttttcagctacgtgagttccagttccagtgggcatcatatggagaaaagcccaggccctaggcgtatggctcccagtctagttatcctcaatcaatggagccaccttacctgaggccccagatgttatagagcagacacgagctgttcctgctatactctgtctgaatcagaattgtgagtataataaaatggttgtagttttatgccactaagctttagggtagtttgtagtgatagataactgaaaccaaatttggtaccttgaaataaggtgctgccaaaacctacaatttgcattggctttggaatttggtgagggttaaagatggagggaccttgagaagacagtgaaggcttgaaacacagagagaaaagtgttattggaggctgggaaaagagtgaacctttgttatatagtgattcaaggtttattggtactgccacatgtggttacatagaccatagaaaatgtatctaatgacttcagtgtatctaaggagatttctaggcagaatgttgaaaaaatgttacctagttttttctaagtatgataaggtacaaattgataaatgaactaaaaaatgaactactaagttttaaaacagaacttagaggaaatatttctaacccaggaatggttgtgttattatagaaaataaaactttttctcatctctagttgcttcaaatggccaatgacttttattttattattattattattattttgagatagtttttctgtcacttaggctggagtgcagtggtgctcactgcaacctctgcctcccgggatcaagtgattctcctgcctcaacctcctgagtagctgggattacaggtgcccgccatgatgcccagctgtttttttgtatttttggtagagacagggtttcaccatatcagccaggctggtctcaaactcctgagctcaagtgatccatccgccttagcctcccaaagtgctgggattataggcatgagccactgcgcctagcctgaccaatgacttctaaataaatggcttcagaggaaagataaaattcaagatgctaccaataaaatatggcctcaaagtaaagatctcagtgatgcaactgtaaatccctttgctaagacttttttttttttttttttttttttgagacggagtttcgctcttgttgcccaggctggagtgcaatggcatgatcttggctcaccgcaacctctgcctccctggttcaagcaattctcctgcctcaacctccctagtatctgggattacaggcatgcatcaccacgcctggctaattttgtatttttagtagagacgaggtttctccatgatggtcaggctcgtctcgaactcccgacctcaggtgatccgcccacctcggcctcccaaagtgctgggattataggcatgagccactgcgcctggccgacttcagaaagatttaagacaatgcctcacaaaacctttcaattagataaagggatatctagaggtcttaagggaatacttcttaggcttactatgttaaacaatagggcttctagggatcttaagtgtgttttctcacagtagcctcacataagacttgcgatagaaaaggtggatgtggcttttgtctgctggagtgaatcccaataagattcataggaaatccacaagattttaaagaaatcataataataaaagaggaacagagacagtagaaagtgaaaataggcctttagatttccaatcatctataggcaggaaacaagcttataaggccactccattgcaaaaattaacccatctcttatgtaaaaagaaggttaattcagaaacttagagggtggagccaagggttgtggagagtcattctcaaggtgtaggacttggctgtaatagaggaactggtgatatgtgtctgattagatttcagaattgttatgggccagtaactgttatgtgtctcctgttccttctccctttttcctcacattttgaatgagagtgtctattgtgcttatcttaagtcagtctcactattgtatgtttgtatgttgggtgtgtgggagcagataatttgtttctttaattcagatcaggaggaactatactgcagtagctgtacctgaggaactgcatctgaggagcctcaaccacatctggacctgatttagatatcgagattctggacatcaagctgatgccataatgaaatgagacttttgaaggtcttagaagagggtgagtgtattttgcatgtgggagggccttgttggggccagagggtggtctgtggtagcttgtatccaaagtggccgccaccaatttcttcccttcttgctattcagtggtggagtctatttcccttgtccccttgaatctgggctggctttagtgacttgcttaaccaatagactgtaactttctgggacttcagaggctaggtcatgaaaagccttgtgtcttctgcctgtgcccgttggaatcctctctcttggactgcttgcacatagaacccggtcaccatgctgtgagaatccccagccagatggagaggacacatgtaggcactggttgatagccccattgagctaccagcaaagagccagtatcaactgtcagccttaggagtgagtgaaggaaccatgttgaataatccagccctagcagacaccatctggagaagagccaaggtttcagacttatggcacatgttaagacatctcagccatcttcatcctttcagggcatcccacctgagtttcccagacatcgtcaatcagagacaagcggtctctgctgtgccctgccagaatttgtggcccacagaatcatgagaataataaaatgattattgtttaacactactaagatttagaatagtttttaaatttagccgtagataactggaacatggccaggcgcagtggctcacacctctaattccagaactttgggaggctgaggcgggtgggtcacctgaggtcaggagtttgagaccagcctggccaacatattgaaacccaatctctactaaaaatacaaaaattagccaggcatggtggtgtgcacctgtaatggttgcaggcgcctgtaatcccagccactcaggaggctgaggcaggagaatctcatgaacccgggaggcagaggttgcagtgagctgagattgtgccactgcactccagcctgggtgacacagcaagaccttgtctccaaaaaataaaaaaataaaaaaataactggaacattgccaaactgaatagaaaataatccaagtctatgcagtttgtaagaaatacacctaagacataaggaatgagagagactggaaataaagatatggaaaaatctattccaaaagaaagctggcatagcaggttaatagtagccaaaactgatttgaaggcaaaaatcattatttgcgttaaaaattatcagaaaaaaattgtaaaggaagaattaagcaagaagctataattccaaatcagtatgcatcttatagcatggccttaaaatagatagatagaatacaaaatatgtagatagaatataggaagaaaatatatagatacaaatatgaataaatttataaatctataaaatggaaaaatttaacatgtctttttgagtaattgatggtcaaacagacaaaaacaacttgagaagataacagaagatttgaacaaccaaccaacaggcttcattttttggatatgtaccaagccccacgcttaatagatgagaatatacattctttttagggagttttaaaaaaattgaacacacactgaattcataaatcaagtctcaacaaaaccaatgaatggatattatgcaaactattctcgtactcaattcagttaagactgaaattgagcaaaaagataaccaaaataattttatatatttggaaatttaaaagcatacttctaagtaactcatagatcaaagaaaaaataataatggaaattataagtaaagccgaatgataatataaatactgtgtatcagaattatgggttacaactaaagcagcatttagagggaaatttatatcatcacaaagaagatgagggtaagaaaaactaattaagaacattaaaaaagccaaagggaaatttacagccttacatgcttatattagaaaaaaaacagagttcattatttattagtcttagtatttgactgagaagttatttttaaaaagaaatgaataaaaaccaaggaaagtagaagggaagaataaaaaaaaaaaccagaactgaatgaaattgaaaacaggctgggcacagtggctcatgcctataatcccagcactttgggaggctgaggcaggtggatcacttgaggtcaggagttcaagaccagcctggccaacatggtgaaattccgtctctactaaaagtataaaaatgctgtgcatggtggtgggcacctgtaatcccagctacttgggaggctgaggcatgagaattgcttaaacctggaaggcagaggttgcagtaagttgagatcatgccactgcactccagcctgggcaactgtctcaaaaaaaaaaaaaaagaaaaaaaccacaaagatataaaagaattaacagcaacaaaagttggttttctaaaaaaaaagattaaaataagacaaagccctgcaaagattaatcagcaagacagagtgaagatacagataccactaagattgaacaagaagacatatctacaaatacagcatagattatgaaataacaaatgtattattaacaaatctatggtgctaaattgtacagcttagataaaaagaacagcgttgtgaaaaatatatataacttaccaaaattgactcaaggaggaatacaaacctgaagagacctataatcattaaatattttgaattaataagtaaaatactacctaattgaaaagaggcacagatgcaatttttacaatagttttataaaggggtataattgacaaacaaaaaactgcagatatttaaaggttacaacttggaaagttttgacacatgtctaaaaccatgaaactattgttacaatgaagataaagaacatatttattacctctaaagtctctctcttttttttttttttttttgagatagagtcttgctctgtcgcccaggctagatggagtggtgccaccttagctcactgcaacctccgcctcctgggttcaagcaattctcctgcctcagcctcctgagtagctggaattacaggtgcgcaccaccacacccagctaatttttttgtatttttagtggagacagggttttgccatgttgcccaggctggtctcgaactcctgggctcaggcaatccacctgcctcggcctcccaaagtgctaggattacaggcgtgagccactgcgcctggcctctcctgtctctaccacccagtttcatccctaggcaatcactgatctgcttcatataataatagagtctgcattttctaggcttttaagtggaatcaagtagtatgtactctttggggagaggggagtggggtaattctggcttcttccacttagcatcattatttcgagatttatttatgttgttgattgatcaaaggtctttttcattgcatagtagtaccatcgtatggttagaccacatttgatttattcgttcacctgttgacagccacttgggttatttccagtttgaggctatcataaataatgcttctgtgaacatttattagagatatgtttttgttcctcgttgttaaatatctggaagtgtgatggttggattatataagtgtacggtttaatttttaagaaaccgccaaactgttttccaaagaggttttgccgttttacattcccaccaggtttgaattcctccacatcctcatcaacatttggtatggtcagtctttatttttagccattctgattagcataaaatagtatttcattgtggttttaatgtacttaagtgactaatgctgagaatcttttcatgtactttttgtcatttgtatgtctcttgtggtaaagtgtctatttaaatattttgaccattttattttattttttatttttttagagatggggtctccctgtgttgcccaggctggtctcaaactcctgggttcaagtgatcctcctccatcagtctcccagtgtgttgggattacaggcgtgagtcaccacatccagtctctttttaccatttttaattaattgggttgtttattttctaattattgagttttgagagttatttatatattctagatataagtcctttatcagatagatgatttgcaaatatttcctcccagtctgtggcttattttttttattctcttcacaatgcctttcgaaaagcaaaatctttgtattttcatgaagcccaatttatcaatttgctgttttatggcttgtagttttggtgtcatatctaagaaatctttgtccaacccaagattagaagagctttctcttatgttttcttctagaagctttataattctggcttaacattttataccaatggcccattttgagttaatttttgcatatggtacaaggtttgtattgaagctctttttttttttttttttttgcatatgaatatctaattgttgcagtatcatttgttggtaagactcttctccactgaattgctcttgcacctttgttgaaaatcagttgtctacggatgtgtgggtgtatttttggactttcttctgttccattgatctgtttgtctaacttgacacaactaccacattatttttatagctatagtttttataagtcttaaaaactgatagaggtagtcctccagctttgtatttctttttcaaagttgttttgactcttctgcgccctttacatttccatgtgaattttagaatcagtttgtcagattctacaacaaagcatctgggatttttattggaattgtattgaatctgcatttggagagaattgatagcttaacaatattgaatcttttggccatgaatggcatatctgtaccatcttgtggacatcttttatttctctcagaagtgtttggtagttttttttttttttcctgcctcagcctcccgagtagctgggattacagacgcacgccacaagacctggctaatttttgtatttttaatagagatgaggttcgccatgttggccaggctggtctcacactcccaacctcaggtgatccccccaccccggcttcctggccagtgtttaatagttttcaataggtcttgcatatcttttgtccaatgtatcgatgtttcatgttccatgtttcatgtttttgttattaccctggaaaggggtcctaatctagaccccaagagaggattcttggttctcatgcaagaaagaatttgtggtgagtccacagagtaaaatgaatgcaagtttaagaaagtaaaggaataaaagaatggctgcttcataagcagagcagccctgagtgctgctggttggctatttttgtggttatttcttgatcatatatgttcaacaaggggtggattattcattcatgagttttgcaggaaaaggggaggcatttcccacaactaaggggtccccttccttttagggtaacttctgatgttgccatggtatttgtaaactgtcacggcactggtgggagtgtcttttagcatactaatgcattatcattagcatataaccagcagtgaggacaaccagaggcacctcttggttttggtcagcttctttaccgcatcctgttttatcagtggtgtcttagttacctgtgtcttgtgccaacctcctatctcatcctgtgactaagaatgcctagcttcctgggaatgcagcccagcaggtctcattttacccagcctctatttaagatggagtcgccttggttctaatgcttctgacaatatggttgctttttgctaatatacagaaatatcaattgacttttataaattgatcttatagtctttaagtttgctaaatactttttttttttgagagagtctcgctctgttgcccaggctggagtacagtggcacgatctcggctcactgcaacctctgcctcctttgttcaagcagttcttctgcctcagcctccctagtagctgggattgcaggcgcccaccaccatgtccagctgatttttgtattttagtagacacgaggtttcgccgtgttggccaggctggtctggaactcctgacctgaagcaatccacctgccttggcctcccaaagtgttgggattacaagcatgagccactatgctcggccctaaatttgctaaattcttgttttagttctagtagcttttttgtagattccatcagattttcaactgaggcagttttttgtcaactatgagtaaagacagttttacgactcgctttctagtctagatactttataagttcttattttattgtacttttcagatgatcccatacaatgttgaatagaagtggtgagagtagacaccaataagtatgatattagctgttgttttttttttagatcccctttatcatgttgagaaagtttccttgtattcctagttttctgacagttttcatcaggaatttctggtggattttgtctaatgcattttctgtatctattgaaatgatcacatgatctttttaattttgttaacatggtgagttacattgattctttttttttttttttgagacagagtctcgctctgtcgcccaggctggagtgcagtggtgccatcttggctcactgcaacctctgcctcctggttcaagtgattctcctacctcagcctcctgagtagctgggactacaggcgcccgccaccatgcctggctaattttttgtatttttagtagagatggggtttcaccatgttagccaggatggtctcgatctcctgacctcatgatctgcccaccttggcctcccaaagtgctgggattacaggcatgagccaccacacccggcccattgattcatttttaaatgttaaactcaccttctattcttagggtaaatttcacttgattgtgatgtattctttttatatattgctgggcttggtttgctgaaatttttaaaatattttttcatctatgttcatgagagttattagtatgcaattttctttaggtctttgcaaggctttggtattaggataatgctgacatcataaaatggggtaggaaatgtttcttcttttcagtgttctagaagagtttttatagatttccttctgatctttattttctttcttctggttgctttgtattttattagttcttctgtttctagatttttttttttttttttttttttttgagacagggtctccctctgtcacccaggctagagtgcaatggcgtgatctcggctcactgcaaactccgcatcctgggctcaaatgatccttctgcctcagcctctcaagtagctgggactacatgcctggcaccaccatccctggctaatttttgcattttttgtagagatagggttttgccatgttgcccgggctggtcttgaactcctgtactcaagtgatccgcctgccttggcctcccaaagtgctgggattacaggcgtgagccactgcacctggccatgtttcttgattcttgaaatggaagctgaagtcttttatttgagaccttcttttattaataggaatgtttagtgttatacatttcctttagtgctgctttagcaacattccacaaattttgatgtactttcattttcattcagttagaaacacttcctaatttcccttttgatttgttctttgacccatcagttacttaggtatgtattactttacttcctgatatttgggagttttgcagatattttcctttgttgattcctaatttaattccattatggttagagaacatactttgtatgactctaattcttttatatttattgaggattgatttatggcctcaaatatggcttatcttggtaaattttttatatgcactgaaaaaatatttttctattattggtgcatttttcttgtgttttttgttcttatggttcatttagcatcttagatctatgagtttattgtcaatatcaaatttggaaaaatttggccactatttctttaaatatccctgtttatcctctctttacttctgggaactctagttacatgtatattaaactgcttaaagtgttcccagaattcactcatggtctttttattctttttccactctggtttactttgggtagtttttattatgtgtcttctagttcactcatctcttatgttttgtctgatctgccatcagtcttatccaatgcatttttcatattagacattattctttttatctgtagaagttggatttaggccttattttctttctcccatgtttctacttagctttttgaatatggaataactttgttaattcccttgtctgctaattctaacatatatgtcaattttgttagcttcagttgattgatttttttcttcttcatgggtcatattttctttgcatgtttgataaatttttgtggattataaacattgtgaattttacctgtttaggtactggattttttttttatttgttctgtgtcacagttaatttattaatacagttgaatcctttccttaagatttgtttcaaaaacatagagagaagagggggagaaaaaaaaatatttgttaggtggggccagagcagttttccatctagggtagttactccccaggatccttggaatactctacctcgtgccttgttaattacggggttttccagtttggctggtgggaacaggcattgttcttgttctgtttgagtgccagttagtgttccctctagttttctaagtagttcctacatgcactcactggtcagtaccccactgagtacttaagaggagcccactgcagagctccaggtgctcccagcatgcagcgcgttttccagtactccatcctgcacactgtctctgccttggccttcccagactctcagctcaatctcttcaacgaagatagccctgggctctacttgggttcctccttcattaaactgcaccttggaaatattctcaaggcagtaagcagaagcattcacagaacttacttcacttgttttctgtctctcagggattgctgttcttcattgcctaatgtgcagtgtctttgaaaccatcatttcatgtattttctctgctttttttgtttgtttgtttcaggcaggtaggtaaatcttatacttgttattacatattggctagaaatggaagtccattattttaaatacttcttatgtgcttgaaatgtttcaggataaacatatagactaaatggatatatttgccaaagatgaggtactgacagaaattttctagactttaaaattaagtttcaccttcttctcttccatcattttgagactaaagttttatattttaagtgttttttggtatttgcttgtgctttgctttttatctataaaaaagaggtttaatatgttctatggttgtgtgactcaaacaatatagtactttttgtaccacaggccctgaggtctgaactcagcatcactatcttttttcatattagcttccaaatagcatcaggtggtcatttttaaaatttaaaaccagtctacctatcttgtttgatttgatcttgtgaccttagggaagaaacccacccaggaatagaataaagaaactttttacatcctgaggctttaaaaaacaaaatcaaaatccagctatttaaaaaattttaatatctttaaacctttctacaatggagtcatttttttaaaagaaagcactgtcctttgcctggttaatgaataatgtgagtactattttattataaataattgatttccaggacttcctggggtaggaagaatgtgtcctagctgaataaattaagggaagtgataaggactgaattctgttagtggaagtaataaacgaaagaaagttatgtggttggggttgactgtgagcagagagtgattccgtagttaagatgaagggatttgttagtcttctcagagaggaaggacaagcgtgaggaataggaaaatttcacctgtaggtgggatggaaaaagcttggaataattggccgggcatggtggctcacgcctgtaatcccagcactttgggaggctgaggtgggcggatcacctaaggtcaggagttcaagaccagtctggccaacatggtgaaacccccatctctaataaaaataaaaaaattagctgggcatggtggcatgtgcctgtaatcccagctgcttggtaggctgaggcaggagaatcgctggaacccaggaggcagaggttacagtgagccaagatcgcaccactgcactccagcctagatgacagagttgagacttcgtctcaaaaaaaaaaaaaaaaaaaagcttggaatagttgtttgggggccatcctgagacaatgtgattctcacatatgggagtatgaagataaggaatctcttggagaattctagcttgtgactttcactcctgctttctctttctcctctatgttcagtatgcaattgttgattaattgaaaaggagtggaaatgaaaaaactaaaaaatttttttttcaaactagaaaaatgtcttaagaaattgaaaatgaaatcattagtttctagagctttatttttggcaaactagaataatccaagttttattttactaattttatagaattatagccctaggaaggtaagcaaatttctgttttctgctacaatatttttgtaatggtgaaatctagttaaaatattttggagtataaaaaattagaaaacatggtacagaagaggccagtgctgctcaggggttaataaggctgggacagccagctctagctgtaagcatatgtaggttttaatatactaaaggccgtgagctacagcttttgctttctctcccatctatggcctccctcgtgtatttatatatgtagcctccctgatgtgtggatgtatggatgtatttacagctagcatcagctatggttagggctgcattcttttctttctctcccatctgaggcctcctggagtcattcttgcaagagttcacacaagtttgttgaactgaattaaacttcaagtttttgttagaagaattgggcagggatcagagcatagagattcctgatggagaatccatcaggcaaggaaatgaacagctctttgtgtcctgagatgaccagcttctcctacccagaccaggaaggattgttttgccagtcttcccatggtgtcagggaaccaggattgaggagtctaaatttcagttttggcaagttggaaaagaaaaaaaggtacaaaaaaaggaacttaggttgaacttactgccaatctttccccagagggaaatgttcttcctgaccttgtagaatccatgtgattaaagttcttcatgtcctttttagagttctgagcagtaatcctctattttctttctctctctctctttttttttttttttttttttgagatagggtctggctctgtcacccaggttgcagtgcagtggcacgatctcaacctccaccttgctaactgcaaccttcacctcccaggctcaagcaatcctcccaccttggtctcttgagtagctgggactataggtgtgtgccaccccacccagctaatttttgtattttgtgtagaggcaggggtctctctttgttgcccaagctggtctcaaattcctgaactcaagtaatctgcccaccttggcctccctaagtgctgggattaggggcatgaaccaccatgcctggcctaaatcctctatttaaaccagggccaccttcctacccccaacctccaccaaaaagaaattttagttatatcaaaccaactagttttaggtcacagtgtctttctttggagggtgaaaatgaaagaattgaggctacacaatataaaatgaaatggtaatgtgagcattaattagaattataggtgttttagagcagtagttctcaaacttttttgtctcggggccctttacactctttattttttatttttttgtgtgagatggagtcttgctctgttgcccaggctggagtgcagtggcgcaatctcagctcactgcaacctctgcctcccggtttcaagcttctctccatgagacttgccttggccttttgcttttttacctttacctggttttcaaagacaaatataaatatgagaggaggggagttagtttttttgtttgtttgtttgttttgttttgttttgagacagggtttcactctcatcacccaggctggagtgcagtggcatgcgcttagctcactacaacctccacctcctgggctcaagtgatcctcctgcctcagcctcccgagtagctgggaccacaggcacatgccagtgtgcctggctaattgtttgtatttttagtagagatgggtttcaccatgttggccagcctggtctccaactcctgacctcaagtgatccacctgccttggcctcccagagtgctgggattacaggggtgagccaccacttccagctcctttacactcttaaaaattaaggatcccaaagagtttttgtctctgtgggttatatctatatcaatacttacaatgttaggaattaaacctgataatttaaaaatattgattgattgattgatttaaaatagctataaacccgccatgtgttatttattttaaatggagacatttaataatatttaaatattaataaattgaaaataataatcccactatatgttaacataaataatattttcatgaaaagtaactacattttctaaaacaaagacatttaatgggaagaaaagcattgttttatattcctgccatctctttgatggccaaattcataaaaaactgttggattctcgtatctgcttttgccttatctgatgtgttgccacacatcttgtatcctctggaaaactccactgtacacttataaaataataagagtaaaaagaacaaatataatcttagggttatcatgaaaatacttttaacctcaagcaccccctccagggatacctcaagtagtttctggaccatattttgagaccactgttcccaaactgtttatgtgtgagaaaagagaaacacaagagttatcaccattacttctacagcagatttttccttgtgtttaatcagtactggctgtttagcctaattaagcagtataacatccagactccagaattgaagtgggtggtatagctgaaaactccaagcactgtaccgggagtaagtctcagtttaatgtgctttttaaaagtagttgttgttcagtgtttttgtaggctattgctaaccagtgggagaggaaagttaaggcagctctctgggaaagaaaaaccaaggaattttagagattaaaaatgacctttaaagataatctggtcatcgaattttagactattggatttgaaagtcagatgctgagaggtcatctaatccaacccttaagctttttagtgattataattagtacttgtgatacacaggctaagttctttatgtagagctccttctccccacgtcattttgatgtttactgtttcttttgaatgttttttataatggaaaatgtcgatcatgtactccattactcaccttcaacaattgtgaattcatggccacttgtttcacatatagccctgtccacaccatccactccctggattattggatgcaaattgaagaattttatagcttcacctgtaaacatatcactatatctctaaagataaagaccttaaataacttcaattccattatcatgctaaaaaattagcaataatttttaatagcataaaaacccaatgttcacatttccctcattgtgttattcataaatgtatattttttcagtatgtttgaatcaggatacaaatgagtatcatatagtgcagtttattgatttgtctcttaacattagtcctctcttctcccctgctttttgttttgcagttttttgttgtagaaatcaagtcatttgtgttggcagaatttccctgagtctgaattttgctgattacatctctgtggtgtcttttaacgtgttcctttgtcttctgcaactcctgtaaatttgtatttgtatttattttaatttaattttattttattttattgagacagagtctcgcatcactcaggctggagtgcagtggcgtgatctcggctcactgcaccctccaccttctgggttcaagcgattctcctcctcagcctcctgaatagctgggattacagaggcccgccaccacgcctggctaattcttgtgtttttagtagagacagggtctcatcatattggccaggctggtctcgaactcctgacctcaagtgatctgcctgcctcagcctcccaaagtgctgggattacaggcgtgagccactgcgcctggcagtacttctatttagaagagtgctcagacttcttcatgagtggtgttaagtacttccatcagaaggtacataaatgtctgcatgtcttttttgttttaaaattttatctatttattattattatttttgagacaaggccttgttctgtcacccaggctggaggtgcagtagcatgatcatagctcactgcagcttcaacctcctgggctcaattgatcttcccacctcagcttcctgagtagctgcgactgcaggcatgcaccaccacgcctggctaatttttgtttgtttgtttgtttattttgtagagatagagttttaccgtgttgcccaggctggtcctgaactcctgggctcaagccatctgccagccttcgtcttccaaagtgctgggattacaggtataagccaccacaacgggcctattttaatttttattttacttttttgagtcagggtcttgctgtgtcacccaggctggagtgcagtggcacaattacagctcactgcagcctcaacctcctgggctcaagtgatcctcctgcctcagcctgcctaatagctaggagcacaggtgtgtgccacaatgcctagctaatttttaaattttttttgtagagatgggatctcactatgttgcctaggctcgtcttgaactcctgggttcaagcagtcctcttgccttggcctctccgagtgttgagattgcgggcgcaagccacctcgtccaacctgtctctttttgtgtgatgttagtaactattgatgatttttacttagatccattaaatcattaagagctatacaatgatgatattctagttctattattctttcatttattagctggaatacttctataaagagaaacctccccttttctaatcttcgatttacccagtggtataatacatattggaaagtcaggatgaatattttgttctttccccttgtttaccaattttcagaatactgtattggttcactagcattctccaattaggcattggttttggtgggggtttttttggtatcataaactcttgggtttaaacatttttgaatatgtttcaattcattgcatttttttccttttctagtgattttactgatatatttcttctttctttctttttttttttgagacggagtcttgctctgttgcccaggctggagtgcagtggtgcaatctcagctaactgcaacctccgcctctagggttcaagtgattctcctgcctcagtctcctgagtagctgggattacagccatgcaccacctcgcccaactaattttgtatttttagtagagatggggtttctccatgttggtcaggctggtctcgaactcttgacctcaggtgatcctcccgcctcggcctcccaaagtactaggattacaggcaccatgcccagtggcatatatatttcttctaataaactcagcttgatgatgaggacgtgtcttagacatctttctgtccatggtgcctagtgcgtggctttcaataaatgtcaaatgaatgagttgatattctgagcagcatttaaaaataagagctagtggctgggcacggtggctcatgcctgtaatcccagcactttgggaggccaaggcgggcggatcacgaggtcaggagatgagaccattctggccaacatggtgaaaccctgtctctactaaaaatacaaaaattagccgggagtggtggtgggtgcctttagtcccagctactcgggaggctgaggcaggagaatggtatgaacccgggaggcggagcttgcagtgagctgagattgcgccactgcactccagcctgggcgacagagtgagactctgtctcaaaaaaaaaaaaaaaaagttttggaggcatgacagaggagcaaagtccagtattactttcctgtgtgagctgaagaaagtgcagtataacagtaaaaaataatatggttgcaggtgaaagaaaaacatgttttttaaaaagtgaatgtggccgggcgtggtggctcacgcctgtaatcccagcactttgggaggctgaggcaggtggatcatgaggtcaggagttcgagaccagcctggtcaagatggtgaaaccccatctctactaaaaaatacaaaaattagccgggcgcagtggcgggcgcctgtaatcccagctactcaggaggctgaggcaggagaatcgcttgaacccgggaggtggagtgtgcagtgagccgagatcacgccactgcactctagcctgggcgacagagtgagactccatctcaaaaaaaaaaaacaaaacaaaacagttaatattatttaattgccatttgttaacagacgtggcattgtttccactattgtttccagtggatcttttaattatatttattaaaatataaaaaaaggagtaattcagagtccttgtctttacttcacttgctgtaagataagtaacatttaaaagccacctttcctcccctcaggttcttttctcttttaatataaatggcaaagagcatacatgtttatgacagacatgttccccataagtttattcatttattctacaaacccccccaaaattttgcagggaagtaaaacaaaactaagtacccacaatatgtgaggcaccgctctgaacatttttgcatggattatacatatcatttattcttaccacaactctataaagttggtaggattattatcatcgtctcctttttatagattaagtaattgaagcacagacattaagtaacttactgagggcatacaactagtgaatattagtgctaggattcaaatcatgcattcttttaccggagcctctgctgttaaattactttcagtgactttacccgagaccttttttttttttttttgcaggatggggtggtattcataaaagaattttataatcatgtgaataataaaatttattgccacaaagtcttttttttttctttttttttgagacagggtcttgctgtgtcacccaggctggagtgcagtggcgtgatctcagttcactggaagccccacctcccaggttcacgccgttcttcgcctcagcctcccgagtagctgggactacaggcacccgccaccatgcctggaaaattttgtttttgtatttttagtagagacggggtttcaccgtgttagccaggatggtctcaatctcctgacctcatgatccgcccgcctcagcctcccaaagtgctaggattacaggtgtgagccactgcgcccggcccaaagtctgtcattttatgatgacaaatatggctaagtttttttttaatggaactttattcctccaaaaaatgacttttaatttttcccaggccatcatttcatggttggtattaagacaaacaattatgaagtgttgaagaattaagttcctattattactgtatcatgtattactgtaaaaaaattagaattcatagaatttgcaaatcttgaacatttttagtaggactactgcttgtaacaatttgcttaccatcactttccctttgattagataattataacttgttttgtgtggttataaacaggttcataacattctcatacatgagtcctaaagaggcagccatcctagtttcttcatctgtctttgcttcattgtcatgaatttatgcgtggataaagataaaataagtcacaagcactataataatcagcagttgtcacagctgtgagtatagcatatgtaatagagcccactggttgtccaaaattgcttgctgactagggctatatatcattcctttctctcccactcagtaaagttaaatgtgacacaagaatgaaaatgatgttaaggctgggcacggtggctcacgcctgtaatcctagcactttgggagtctgagacaggcagatcacctgaggtcaggagttcaagaccagccaggccaacatggtgaaaccccatctgtactaaaaatacaaaaattacctgggcatggtggcacacaccagtaatcccagctagttgggaggctgaggcaggagaattgctggaacccaggaggcagaggttgcaataagccgagatcatgccactgtactccagcctgggtgacagagtgagactctgtcttaaaaaaaaaaacaaagaaagtaagttatgttaatagggattgaatttactttaacttattcattagaaaggaacttaaatattaggaacaagttatttgggacacagttttatagcttctagactgagaaacgttactcttaaaagcatattgctttgggaatgatagtaagaggagtaaagaataaaagcatattgcttacccacttttaaaattatttatttatttattagagatggggtctcactgtgttgcccaggctggtctcaaactaccaggcccaagcactactcccacctctgcctcctgagtagctgtgattataggcgcttgccactgtgcctggctttctcaagttgatcagtgaagacagagtttttgggttttttttttggtatctttcaaagtatggcattgagaaactcatttgtaatggttgcggaaaaggaatttttaaaaaaggaagctaagaaataataaatgctaaacttattgtaataagttatagttgttggttttccaagactaagaggttaaaagtactcttaaagcacataaaagttatatacaaatatatgtataccccttcaactaataaccagagtctggccttgaaaatgttctagtagaagccacagattgattgtgactaaaactggctggacgcgggaggccaagaccagcggatcacttgagcccaggagtttgagaccagcctgggcaacatggcaaaaccccatctctacaaaaaatacaaaaaaattagctgggcatggtggcacatgcctatagtcccagttactaggggggtgggaggactgcttgaatccagcctgagcaacagagtgaacccttgcctcaaacccctccccctaaaaaaaaaaccccaaaaacttatttgaggaaacccaatacacacataacattttttcaaacaaaaatgataaaaattgcaacaattaatttaagttcttataggtcagggatctaacatgttcaaattgttcaaatatttatagcagtaatctcttaactgtcttttggaatatagtataattccaggagagagatggcttagtatgaatttgtatatagtattgagattaagacttggatgtgatttgttccaaactaatttagagattgttaattcacttttaggaactaatttcacagtcaacgtgattttttacttattggttgtgaaaagtgctttatctggtttgtttggtagtaatggagaaagattatttagattaatgtttgtattatttcactttgtatctaatcagttattttgtagaaaaagaaacattcttctcttctttattgggagactgaaaggtgtattctagctggcatttaaatatatgtttagttggtagaacaattactttgtgtacctatgatgaatgttatttatttggacacatttgccttttcctatttttttcttaattggtttgactgcatctctaaaagctctctttagattgatgccaaaaaatcccacatgtctgacggaagtgccaggaaagtgttaatgcttcaatttccttgattcttgtcccttaatttttaggggtcattgaaatcagaagggttagactctctagaggctgttggtctgtttaagaactattccagagaaggaaattaacacttacatgcctgttagtattaggaatttgatgtattaactcatttaattcttagaattctgtgaggtagatggtatatcaatttttctgatacagcaattgaagccagttatcaatttaccataagtcacacaccttaagtggcaagagtgtaatctgaatccatatcggtctctaaatatctctctttctactacaccatgttaatctatatccaccacaacactgtagctgttcatctgaacaggatatcttttattagcaaatattttaataagatggggcaggtattgagattagtagacgtgttaaggagattgcaatatgtgatgtatagaaaaatcctgggactataacttcataaattagaattttagatccactattaacgtgtaccctggataagtcatatgttgcctttgttgtagttttccagtctgtaaaaatgaagatgttaataatatctattctgccttcccagtggggtgtgttgaatgtgtgtttgctggctttgaaaatgataaaactttaccaatgtaaagtattaagtaatgtggttctcaggagttgtgtggcttgatggattggtaccattcttttaaccaagaaacaattagttgatcttggcagtaggccattggaactcaaagaaatagcatctgtcaatcacagtcatttcttggaaggaagaattgaaaaatggcacaggagttattctccttgacctctttctctgaaagggaatttgattaggcaagctggtttcataatagagtagagcttctctcttctctccggggaattgaagctgagcagccaggctggttctgtgaagccagagcaatctggttttaaaggatttaactaaattctctatgattaaggttttctgagggatgtgcattgctgagcagcagctttaaaaatgttacgtatgagtcagtctgtgtccctagactgagaacagagtagtggaactggtttaagttcagggaatagtcttcaacaagttcatagcatcttgaagagaagcctagactctgaaagctgaaaaaataggcagtaggagaccattgtatagactgtagaactgagaccccatctagtcattatttggtatttctccacacctttgttagtgagctgactcaagtactttataatatagaaaaataaaactaaaggtcaacaatcaacatacagtaggtgtgcagtaaggatatgaatatgtaataaaaatgattgtaaatttatgcctaattattgtcttacagtgaaggccgtgaatggccagagaaactacttaaaacatttgagtttctgaaactacaggcatcctcagagggttaatgcatgctcttagtagaactcaaatgtctctaattaggaagatcttaatcctttattcttccaacagttgctgactttgctggggagttgttcgtatatatgcagaattaaagccactggtttaagtaatttggccaaagtcaggataaaaatagattagtttctctaaagcttctctgcgtttatactgttacctttatttgctaaatagattttggataaatatatagctggttttagatcttggaatcttagtactgtagacagccacttgccttcgctgcttcaatccccattccagtatgtgttattccaactcattggagactttagaagtgtgattagatgagtctcattttggaggaatcatgtaggattacccctatgatagttacttaaaattcttatcactatatttaggagaaaacacatttagatggaagtaaaaaatcaaggaaataataggaagagtagaagagaggttgcataaagggagccagtgagtaacctctgtacaccttaatattccatcaaccacagacttttcttccaattaagtactttcccaaagaatcacaaacatcaggggaagaaagacaaaattattttctggtgttatgttggcattcattggatttaaatattttggggccaggtatggtggctcacgcctataatcgcagcactttgggagactgaggtgggaggatcactcaagctgaggggttcaagaccagcctgggcaacatactgagaccccatctctacttaaaaaaattaaaaaattagttgggcatgtaacacatgcctgtagtccagctacttgggaggctgacgtaggaggatcccttcagcccaggagttcaaggctacagtgagctatgatcatgtcactgtactctatcctggttgacagagtgagaccctgtctctaaaaaataaaaataaataagaaattttggcttcctagaatggtccatgcagttgatagagagtaaatgcctggtttattaaaatggaaaggttaggatgcttatacctatttttcacataatctggaaggtaaattaagtaaaaatttcaggacattctgatactaggtagtttaaaacaatactcaaatggtttctgaaaatagccttataaaggagaattaaactaaattggctcagttggagtccttacccttgcttggtgagttagagttttcggaagcttaaagtttatattctttttgagatttaatatatgtcaacctttctgaagtgggtagccaacttgtgaagactgtgtgtacacatgcacactgatctattgtagccttggcacattgtgtgactttaagtagggtgattggggatgtgaaaggtaaaaggattgtagagaggtggctgctccaaagaggaggaatttctgaaaacatcactgtttattccaattacaaattttttgtagtgctatgtcccctggttaatgatggtgtcagtggttgcctgtgagtcctttgcactctagtatgctttgctttgaagtaaacttcatcttaggaccgggctgagttgtgcatactgctgaaattaaaggtactgaaaaagcatagggtagacaggccccaagggagaagcgactgttgggagctttggaaaactagcgaacagctccagagcactggtgcttggggagcagaagtgtcacatgttgagataggaaatttagaatgcctttgcttgagacctaattggtctccttcctcctatagactgctagaaatttctacgtagctctggactacgggtcccgaagttggaaccaccattctattcctgtcatttgtagtatggaaaagtaacttttttcttgtttataaaatgagaaaaatttttgagaagaatttttttttaatgagtgaaagtatatggtgtttgatagggtaattgagagctgtaatcaaaatcattacctggctggatgcagtggctcatgcttgtaatcccagcactttgggaggccaaggcatgggaagatcctttgaacctgggagtttgagaccagcctggacaacatagggagagccagtctctaaaaaaaattaaaaattagcccgacatggtggtggactaatccactaatagtgtcagctactcaggagtcttaggtgggaggattgcttgagctggggaggttgaggctgcagtgagccatgatcctgcccctgcattccagcttgggtgacagcgagatcctgtctccaaataaacaaatcattacctgctgaaatagtcattcccagtttatataatcagatagctagagggtaactatagacaagaaagcctgtggtttaatttgataggaaagactctaacctcattgagagaaaacgatcagaaaatattccttttctaatggcaagagaggaaaaacttataaattaggttcatattatatagggagtggggtattcaccagccagcctatttctgattccttagtgaaatctgatttaggaaatacaaggtagcctggttttattgttgaacaagggaaggagaaaatcactttgtcttatctagttaactaaatatttcaaggtaaggatatgaagatagtttaaatttccgttacaactggtatcaaattttgcttctctgctttgattagaaactgtctccacctgctggccgcaattcacttggcatttcatgaggacacctggttttttgttttgttttcttgaaacatataacagctatggaaagtacttaggcagggttgtagtgactaaaatacctctatgtagcttttcctaaaattcccagaaggattttggagttttttcctaaactttgcttgggggataatggaaaagaagcaacgtaaggccttacaagaaccaaaccaaagcagcacatttgcagtgtttgtttgatatttgtcattctaccaagtgatttgtctattttatgtattatattaaactgtttaagctttgttatttataattaaggtcattattttccaaattgctgttagtttcacctcttttgcctgtttggaaataattatcacaatcattactgaattatacaataaaataaaacttttcttggtctaaaggtaggcaagctttttctgtaaaggctcagatggtaagtgttttaggctttgcaggctatatgttttttgttgtaactactcaaacctgttattgtagcgaaaaaaagtatataggcaatacataaatgaatgagttccaaaaatacttaatggaaaccaaaaatttgaatttgatacaatttccatgtgccatgatatattgttcttttttaaattttttgacatttttggggggagaatcagggacagactggaaatttttcaaccatttaaaaatgtagaaactatggggcatggtagtccatgtctgtgatcccatgggaagatcgcttgaggctgggagtttgagagcagcctgggaaccatagcaagtcccctcctctaccaaaaaaaaaaaaacaaaaaactatccgggcatagtggctcacctgtagtttcaactattcaggaggctgaggtgggagagtccaacttgttttttttttttttttttttttttttttttttttttttttttgagatggagtctcgctctgtcccccaggctggagtgcagtggcgcgatctcggctcactgcaagctccgcctcccgggttcacgccattctcctgcctcagcctcccgagtaggtgggactacaggcacccgccaccacgccgtgctaattttttgtatttttagtagagacagggtttcaccatgttagctaggatggtgtcgatctccttacctcgtgatccacccgccttggcctcccaaagtgctgggattacaggcatgagccatcacgcccagccagattccaacttttaggagtacttccgtaacaaagaaaacttgtcagaggggtgttgtacctgttccatctcatcaccaaccacatggcatagaagtacagaactttgtatatgtggaagatgattctttacccacacatgtaggatcatgacctgttgtggtttgattatatacccacggtttagataatttaagttcaaaacactgaaataattttttaaaggagaagactctttttaaaatttttgagaccagcctggaaattttatacatacaggagaaaacttgaaaaatttttttatttatttaaaatttttaattttcgtgggtacatagtaggtgcatatatttatggagtttatggaatatttgatacaggcatatgttgcgcaataattacatcaaggtaaatgagggtatctatcaactcaaccatttatcatattacaatcctattatactcttttagttattttaaaatgtacaattaaattattattgactatagttaccctgttgtgctatcagataccagatcttattcattcttcctggttttttgtacccatgagccatccccgcctcccccccagcctcctcactacccttcccaacctttggtaaccatcattctactctctatctccatgagttcaattcttttaatttttatctcccagaaataggtgagaatatgcaaagtttgtctttctgtgcctggcttatttcacttaacataaggatatctactttgattcatgttgttgcaaatgacaggatctcattcttttttatggctgaatagtactccattgcttatatgtaccacatttaaaaaaatctattcgtctgttgatggacacttaggttgcttccaaatactggctgttgtgaacagtgctacaacaaacatgggagtgcagatatctcttcaatatactgacttcctttcttttgaatatatgtccaacagtgggattgctggattatatggtggttttatttttaattttttgaggagtctctaaattgttcttcatagtgtatgagggtttccttttctccatatccttgccagcatttgttattgcctgtcttttggatatacgccatttcagctgtggcaagatatttcattgtagtttttctatgtttttttgagatggagtctcactctgtcgcccaggctggagcgcagtggcacaatctcagctcactgcaatctccacctcctgggtaagggattctcctgccttggcctgccaagtagttgggattacaaatctgaataatttttgtatttttagtgaagatgtggtttcaccatgttggccaggctgatctcaaactcctgacctcaactgatctgcccaccttggcctccctaagtgctaggattataggtgtgagccactgcacctggccttgagcatcttttcatacacctgtttgccatttgtatgtcttttgagaaatatctattcagatcttttgcccattttttaattgaattattagattttgtttccatagggttgtttgagctccttatatattatggttattaatcctttgtcagatggatagtttgcaaatactttctcccattctgtgggttgtgtcttcactttgttggttgtttcctttgctgtgtagaagctttttaacttgatgtgatctgatttgtccatttttgctttggttcctgtgcttgtggggtatttactcaagaaatctttgcccactccaatgtcctggagagtttccccaatgttttcttttggtagttgcatagtttgaggtcttagatttaaatctttaatctatttttatttgatttttgtatatgtgagagatagaggtctagttttattcttctgcatatggatatccagttttcccagcaccgtttattgaagagactgttctttccccaatgtatagttttggcatgtttgtcaaaaatgagttcactgtagatgtatggatttgtttctgggttctctattctgttccattggtctatgtgtctgtttttatgccagtaccatgctgttttggttactgtagctctgtagtataatttgaagtcaggtcgtgttattccttcagttttgttctttttgcccatgatagctttgactattctgtcacttttgtagttctatataaattttaggattttttttttctatttctgtgaagaatgttattgggatttggaatctatagattcagtgcaatccctattattacactgattctgctttaggtaggatggacatttttacaatattgattgttccaatccgtggacatggaatgtctttttcttggtgcagggggtattcttttcaatgtcttgcatcagtgttttatagttttcattgtagatatatttcacttatttggttaattcctaggtatttaattttatctgtagttattataaatggcgttacttccttgatttctttttcggattacttgctgttggtatatagaaatgctagtgacttttgtgtgttgattttactgaatttgcttatcagttctaataggtttttggtggcgtctttaggtttttccaaatataaggtcatatcatctacaaacaaggataatgtgacttcttcctttccagtttgagtgcccttatatctttctcttgactcattgctctagctaggacttccagtactatattggatcatagtggtgaaagtgggcattgttgtcatgttctaaatcttagaggaaaggctttcagtttttccccattcagtatgatactggctgtgggttgttgtatatgttttattatgctgaggtatgtttcttctatactcagttatttttagggtttttatcatgaagtgatgttgaattttatcaaatgctttttcagcatcagttgaaatgatcatatggttcttgtccttcactctgatgataggctgtatcacattgattgattggtgtatgttgatccatccttatatccttgggatacatctcacttgatcatgatgaatgatctttttaatgtgttgttgaatttgatttgttagtatttgttgaggatttttacataaatgttcatcagagcctgtagttttctttttttggtgtgtctttttctgattttggtatcagggtaatactggtctcatagaatgagtttggaagtattccttccacctccattttttggaattgtttgagtaagattggtgttagttcttctttaaatgtttggtaaaattcagcagtgaagccattgggtcccaagcttttctttgctgggatacttctttgttttttgagatggactttcactcttgttgcccaggctggagtgcaatgacgtgatcttggctcaccgcaacctctgcctccggggttcaagtaattcccctgcttcagcctcccaagtagctgcgattataggcatccgccaccacacccggttaattttgtatttttagtagagactggtttctccatgttggtcaggctggtctcgaactcccaacctcaggtgatctgcccgccttggcctccgaaagtgctgggattacaggcataagccaccatgcctggccgactgagagatttttaactttgactttgatcttgctacttgttattgatctgtttaggttttaggtttcttcatgattcaattttgggaggttgtatgtgtcaagaaatttatccatttcttctaggttttccaatttattggcatataattgctcatagtagcctcaaatggtcctttgagtttctacagtatcagctgtaatgtcttctttttcatctctgattttattttggtcttctcatgttttttcttagtctggctaaaggtttgtcaatttcatttatcttttcaaagaaacaattttttattttgttgatattttgtattgttttcttcatttcaacttcatttatttctcctctgatctttatttattttctactaactttgggtttggttgggtcttgcttttctacttatttaagatgcattgttaggctatttatttgatgcgtttctacttttttgatataggaacttatagctataaacttccctctttggctgggtgtggtggctcacacctgtaatcatagcactttgggaggctgaggcgggtgaattgcctgagctcaggagttccagaccagcctaggcaacatggtgaaaccctgtctctactaaaaatacaaaaaattagtcgggcattggtggtgcatgcctgtaatcccagctactcaggaggctgaggcgcaagactcacttgaacctgggagctggaggttgcattgagctgacacaagactgtctcaaaaaataaaaaataaaataaaaataaataaataaacaaacaaacttccctcttagtactgctttagctgtatcccataggtttgggtatgttatgtttccattatcatttgtttcaagaaattccttcatgtttgtaccatttccaaaattcttgttattgatttctagttttattccattgtggtcagaaaatgcttgatattacttcagttttttgagtgttttaagacttgtcttgtgacctaacatataatctgtccttgagaatgatccatgtactgaggagaagaatgtgtattttgcagccattggatgaaatgttctgtaaatatctattaggtccatttggtttgtagtgcagattaagtccagtgtttctttgttgattttctgtctggatgatctgtccgatgctgaaaatgggatgttgaagtctctagctagctattgttttggagtcttatctatttagctctaataatacttcctttatatatctgggtgctccagtgttgggtacatatatatttaaaatggctacatcttcttgctgaattaacccctttatcattatataatgacctttttctgtctctttttgtagtttttgtcttgaaatctattttgtctgatacaaatacagttagtcttgctcttttttggtttccattgatatggaatattttttttcatcctttcattttcactctatatgtttctttaaaggtgaagtgtgtttcttgtaggcaacagatcattgaatcttgcttttttatccattcagccactctatgtcttttgattggggagtttagtccatttacattcaatgttattattaataagtagggacttactcctgccattttatttgttttctggttttttttttggtcttctctttcttcttttcttccttcctattttccttttagtggatgtgattttctctggtggtatgttttaatttctccctttttattttttgcatatccactatatgtttttagatttgtggttaccatgaagtttgcaaataatatcttataacccattattttaaactgatgacaacaccgattgtataaacagacaagcaaaaaaactaataaaaactttatacttaggccgggcatggtggctcatgcctgtaatcccagcactttgggaggccgaggcgggcagatcacgaggtcaagagattgagaccatcttggtcaacaaggtgaaaccccgtctctactaaaaatacaaaaattagctgagcatggtggcacgtgcctgtagtcccagctacttgggaggctgaggcagcagaatcgcttgaatccgggaggcagaggttgcagtgaactgaaatcgtgccactggactccagtctgggtgacagagcaataatccatctcaaaaacaaacaaacaaacaaaaaaaaacactttatactttaacttcataccccccactttctaattttttgttgtttctatttatatcttattgtactgtgtcttgaaaagttgtagttattatttttgatcagttcatctttcttctgaaatatgagtttacataccacaattacctaagttcaaaaacacttgaatctgtgttcttctgtgtactattaccagtgagttttataccttcagatgatttcttattgatcattagcatcctcttctttcagattgaagaactcactttagtgtttcgtataagacaggtctggtgttgatgaaatcctttagcttttgtatgtctgggaaagtctttatttctccttcatgtttgaagcatattttcactggatatactgttctaggataaaagatttttccttcaacactttaaatatgtcatgccactctctcctggcctgtaaggtttccactgagaggtctgctggcagatgtatttggagctccattgtatgttgtttcttttctcttcctgcttttaggatcctttctctatccttgacctttgggagtttggatattaagtgctttgaggtagtcgtccttggattaaatctgcttggtgttctagaaccttcttgtacttgaatactgatatctttctctaggcttgggaagttctctattgttatccctttgaatgtactttctatgtctgtctctaccttctctttaaggccaataactcttatatttgcccttttgaggctatgttctagatcttgtcggtgtgctttattcttttgtattcttttttcttttgtctcctctgggtgtgtgttttcaaatagcctgtcttcaggctcacagttcttctgcttgagcaattctgctattaagagactctgatgcattcttcagtgtgtcaattgtatttttccactacagaatttctgctttattctttttttaattatttcaatttcatcgttaagtttatctgataagattctgaattctttcttatgtcatctcgaatttctttgagtttcctcaaaacagttattttgaattctgtctgaaaggtcacatatctctgtttctctgagattggcctctgatgcctaactttgtttgtttggtcagatcatgttttcctcctggtcttgatgcttgtggatgtttgtcagtgtctgggcattgaagagttgggtatttgttgacttcttagcaatctgggcttatttgtacctgtgcttcttgggaaggctttccagatattcaaagggacttgggtgttgagatctgtttttggtcactgcagccatatctgcattaagtggcaccccaaacccagtaatgctgtagttcatacagactcgtagaggtatcacctcgatggtcttgggtaagatccagatgaattctctggattaccaggcagagactcttgttaccttactttcttccaaacaaacggagtctctctctgtctctgtgctgaactgcctggacctaggggtgaggtaacacaagcagccctgtggccaccaacactgggacgcattgggtcagtcctgaagccagtaaagtgttgaatcttgtccagggggtgctgtgaccactacctggctgctgcgtatgttcactcaaggccttagggctctacagtcagcaggtagtgaagccagctagtcttgtgcctttcccttcagggtggcaagttcccttgggccctgggcaagtccagagatgctgttcaggagccagcgcttggagttggaaaccttagaaagaaatctacttggtgccctattccattgcagctatgctggcagtgaaaccacaagacaaatccttcctattcttccctaccctttccccaggcagaggagtctcttcccatgtccaccaccaccaccacaggcctatgagtaccagggcaccactgatgttcacttaaggcccaagggctcttcagtcagcttgtggtgaatgctgccaggcctagaactcacccttcagggcagtgggctcccctctggctcagggtaggtctagaaatgcaatgcaagagccaaggcctggaatcagggaccccaagagcctgtttggtactcttccccactttgactgaactggtacctaagctgcaagacaaagtctcctttattctttcctctccatttctcaagcagaaggattctctcctcatagccaacacagtcgtgaatttgctgggacacacctgaagtcagcatggctcaagagtcttacctaagacccatggcaggtcctagctggttgccgctgctgattatttagagcccaagggctgtttagtcagcaggtgatgaatcctgccaggactgtttcccttctggcctaagatatgtctagaaatgtccgggagctagggcctggaatgggaccttatgatcctgcctggtgctctttcctactgtggctgaactggtatctaagttgtaaaacaacatcctctttactcttccttctcctctcctcaagcagaagaaaggggtctcttctgaagctgggagcttcaagctgcactgccttgggttgagggaggggtgacgcaagcactcccttagccaccctggctgacatctcactaagttatgtgcccctcaagtcccctggctccaagcccagcacagcactaggacttgcccaggagttgtagtcctagtggcctagacagcctttcaagtttacttagaaccccagagcactttagcccatggtagcaggccttatggaagttacagatatgactgctgggttgggtgattcccctctggctagggcttttctgaatgctccctctgtgggtacctgctgagtcctgtctggtgttgccagcactgagttccaatgcaaagttgcacaatcactgagctctccctgccacagcatacagattgcccatgtgggtgctgccaggggatgggagaggggtgttgttgcatttcaagattgtttttcctgcctttttcagtacctctttcagtgatatgtagttaaaaccaggtactgtgattgctcacatgattttgattctaattgaaggtgctttttttgtgtagatagttgttaaatttggtgttcctgcagggaggatgatcagtggagacttctattcagctatcttactccatgtcttctcaggagaagattctttatgttcatttaaaaaacagaaacattcagatagtagaattattctaagacagtttcaaaaaagaaactatcattacaactgaagaataatttgctatagtgaggagcatgtggggttggtattgggtgccctgggccacatgatctgggcagcatggtatggatcattcattataatttcagtgtgatgtcactgtggtcatgtggtggttcttagtctattttggaagataactattttaaaacattgaattaaaaatatttatggttatgggctgggcacagtggctcatgtctgtaatcccagcactttgggaggctgagaccaggcagatcacctgaagtcaggagttcgagaccagcctggccaacatggtgaaaccccgtctctactaaaaatacaaaaattagccgggcgtggcggcgggcacctgtaatcccagctacttgggaggctgagtcaggagaatcacttgaacccaggaggtggaggttgcagtgagctgagatcatgccactgcactctagcctgggcgacagagcaagacttcgtctcaaaacaacaacaaaaattatggttatgtcaggtacagtggctcacacctgtaatcccagcactttgggaggccaagatgggaggatcacttgaggctaagagtttgagatcagtctagaaaacatagtgagattccatctctacaaaaagtttaaaaattagctgggtgtggtaggtacatgcctgtagtcccagctacgtgggaggttaaggtgagaggatcacttgagcctaggagtttgaggctgcagtgagatgtgatcacaccactgcactccagcctgggcaacagagcaagaccttgtctcaaaataaataaatgaaagaaaagaaaatttatggttacaaatggttcatcattttagtttgtcacatataaatatcttctattcttttggttcttgtccgctgccagcccccgcattcctggatcaattttacagtctgccttctctgtttctgcctgtgccttaaaaactgagtgctataaagttatggaattgctgcctctctaagctcatgtctctaaattccaatctcatttgagttctctttaccagtcaccatttttttttttaattttacgttggttggttccctttgccttttccttcagcagctgttacagacttctactcatctcagaccccttcctaatctctgtctcattgtcatacaacccaccttggatctgggacaccaaaaagtttaggctttctcttgtgaactctttcaacttccttctgactttctcattacatgtctctgtttgacctcatttttacctttttcctttctgtcccagaggaagaggtttagctcttcccattttagatagttgtgacatctgtctaaatatatgattcttgataccatctcatccacctccttggtgacttaataacatcatttatatccttgatcttcagtctttccctctccattaacttcattcccatttaaaaaaaagaaaaaagatgacaaaatagaccccataaatctctaatcctatctatatatactcttttagatttatcatttcattttctgtttggtaatagagcatttatggtcaccttttctctgaaaccatgcttgctaagatcaccaaggatctcctgtcaaatcattcattctttcagtggaatcaccagggagtttatatgaagtgatggagacaaggctgagaatggaccccaatggacatcaacatttgagggaattggtgaaggaaaagataatgaaggaaattagaagccagggttgaaggagaaagccaggagagtgtggtattccaaaaagaagagagtttttaagaaggaggggaattaagtgttaaatgctatacagatgtaaaataaaatcagtattgaaaataattcactgaatttagcagcaaagcagtgaagtgttaggatagttggtaaggttaaattgcactggtgagagacattatttgtagggaagcaaaacaagctggggtagaaaactgttttgaaaatattgactgtgaagaataagggagttagagttgctggagagggttgcaagctctagggaaaatgttttttaaagcagtatataacagacttgatgggccaggcgtggtgggtcatgcttgtaattctagcactttgggaggctgatgtgggcatatcactttgagctcaggagtttgagtccagcctgggcaacatggtgaaaccctgtttctacaaaaattacaattagccaggtgtggtggctcacacctgcagtcccagctactcaggaggctgaggctagagaattgtttgagcccaggaaacagaggttgtagtgagccaagatcacaccactgcactccagcctgggcaagagtgaaaccctgtctcaaaaaaaaaaaaaaatgtacgacagacttgaatatgtttaggtgcctatggaagagagtttggagaggaagaaagcaagattggaagaagaagggaataaaaatggactgaagtccttgaaaagaaagaaaggaacatgattcaaagcatgaataggacgattggccttatttacatagaaacaggatatcttatacagtaagagacctattaatatgggatgccatggggccagtccttgaataagttcatctcttttctgtcatggtgatcgtacctattcctgtggttttaaatatcatctaacctaaatgctgacaagtcccaaactctcctgaattccagacttgcatctctaactgccatctttatatgttctctcaggtgtctgtaaacatttcaaaacttagcatgtcaaaactgaattcctctgaaacttacttcttctacactctggtcttaaccccaccccccaccgcgccagcaacttgggcagaaagtcctattgtcattgttgactaccctctctaatactaatctgtcagcaaatccttttggctctactttcaatatattcatagtctaaccacttctcaccactttggtctaagccacactgtcacatcttacgtggattattgcatagccttccagatggtctctgcttctttattgctgtttccgtcgtctgttttcagtttatagctggagggaacttgttaaaacctatgtcagatcatgtcactgttaggttctgactcttgcagtggcttctcatgtcatggataatgaaaggcaacggccttaaaattgactataattatattaaactatgaactcttacttatatttctccttgttcattctgctacactcttttttttcttcttcttttggagacaacgtttcgctcttgtcattgccccaggctggagtacagtggtgcagtcacagctcactgtagcctcgacctcttgggctcaggcagtcctcccacctcagcctcctgagtagctgggaccaggctggagtgcagtggcgtgatcacggctcactgtagtctctacctgttgggcttaagtgattctctcagctcaacctcctgagtagctgggaccacaagcgttcaccaccatgcctggctaattctgaaatttttttgtagatacagggtctccctgtgttgcccaggctagtcttcaactactggattcaagtgatcctcctgcttcagcctcccaaagtgctgggattacaggcatgagccattgcacccagcctccttcattttcttttctttctttctttttgttgtcttttagagatggagttttgctctgttactcaggctggtgtgcagtggtgccatcatagctcactgcagcctcgaatttctgggcctagtccatcctcctgccttagcctcccaagtagctgtgattacaggtgtgagccactatgctcagctctgctacactccttcagatctctagttcttaatagtttttagtcaggaggtcaatatacaagattacctttttgctacagttacctataactatttagactttttttatttgaaaaaattgaggtgtaaaatacacagatattaagtctacagcatatataacaccatccacattgagacattgaacgttctcatctctctagaacattcttgtatactctttccctgtcagaagctccctgcctctcacccccacccgtatgtaaccactattcagacttacatcaccccataaattaggttttctgtttctaaacttgagccctacttatttaatactgttaggtgtaatactatagcctgaccctcttcaccaatccctgcttctgcacttgctactttttaccctgcagtactttttctttcttctgtctctcttaaccactttctaacatataatttaatatgtttgatatttattgtctctctcctagaatctaagctgtacaagggcagggatttttgttctgctacaaccacccaaaacagtccctaatacacagtaagtgttcgataaatattagtgaaatgaatgaatgagaggtctggtgaatggatataaatttgtaggcaatccagatgggaggattcagaaattgaagaaaatctcatgttgtatttttgtttttagagaataagggataaaattgtcttttgggagtacagaggaggtgataggattggggttttgaagacagtgaaggaagtttgaaatgttagaagcatgggagattgaggatttgggcaatgtagatttattgcttattgttggaggctcagtgttctggccgtgagtgtggttcatgtaataccagccaatgtggttgaatgacttacttcagcagaacttagctcaggtgtagaaacagagaaagttgacagtgttttttgctgtgtagtttcagtggacagccagacagacaaaggagttagccagatactgactgaagtgataataccttgagttttggctagcctgagaaagaagcgatagtcaagaaaaacagattgggatagtacaaaaggatcgtttccagaggtatggttgagttcaaactatttccaaatagacacaatgaaaaaaatagaatgggatattgataaaaggattagcagttgtcataaaagttaagataccatagttgattggttttaaggaatactttcttttccattttaacatttctaaagttgagatgccagtttaattggtaacactttctttttactattatgtgaaatgatggtgagtcttccaattaatggcagatttgataaaatacagtatttgaatgttagattccagaaatgtagcatttataggtactgacaaggttaccagggcacagccattagagaatataactaaaaaggagtcgagatcaagtatctggttagataaattatgcccatggacttcaaagacccagagtcatgagctagttgtaagagttttcagcaaatgacatggagtgactagaggtagcagatggcagcatagaaataggtagataggaaaattcaccttcaagtcatcccttctagtctcatgtgtcactttctcagaggtcttcccataaatctcctctcctcaagtctaactatggttttcctctgtactgtctcataatatcttatactttttcttgtgtaattctttattcatttctaattaatcttttattatatgattatattatgtttttctttcaccagattgtaaactcattgactgtaggaattgtttttgtgcattgcctagcacattgtcttagcccattcaggctgtatacaaactaccatagactgggtgacttaaaaacaacagtttatttctcatagttctggagaccaggaagttcaagaacaaggcaccaatagattcagtttctggttagggcccacttcctggttcatagagagccatcctctagccatgtccttgcatagtggaagggatgagagagctctcagctctcttttataagggcactaatcccattcagtcctcatgacctaatcatttcccaaaggcctcacttccaaataccaacacattggagattaggtttcaacatatgaatttgggatgggagtggggtggggacacataggacacactctaggcactgaataaatgaattgaaatagagaacgtaagctgtctgtgaccagattaaggatatagtactctggaataaggttctagaagccacaatggcagtacagagtacattttactaaatttgattctgtttcagtggttggcttatttgctgctttttttagctttatctgttttctctgagcctcagtttcctcctgttagattaagatactaatgcctatttaacagggttatggtaaccattaagtgagtttagtatggaaagcacatcatacagcacctaccacatagttggtgctctgtaagtgataggctgaaatggccatcttcatttttttccttctgaaaaaaaccctatgtcttacctggactattgcagctgacacctgacagtcttgcttttgtccctcctccctctcttttcttctctacacttatgttgaataattcttctaaaatattgatcatgtaatcttccctttttgtatttctataacgtctgctcattgcttgcatgatcaagttcaaactccttggcttggaattcaaagcacttcagggtccagtaccttggttctttcctaatcccctactgtcctgtgctgccatttctctcctgcctttcctgttatactccagcaacatcatgtcatttgtttcccttgcatcccacatgttcagcactctgcctttgctctggaatttctctctgattgaaatgtcctcctcctaggtctgatggagtcctattcattcttaaagttaccacctttcccaacctttatatattttcctataattgcgtgattacactgtgttataaatgtaaatttacatgtctttctttaaacaagactgtgagttgcttgagggcaaaagctatgtatttacctttatccacaacacctgtatcctagtgggtgattagtaaaagttgattgaaccaaagggactgtggagagtttacaacctatttattttacttaaaacagttactcgaaggaggagataggtttgagtgtaggtttaacagggaaaaaatcttaggtgggaatccagtagagaggggagaaaatggtcagttatgaaaattagccgtcagccattttagtactaatgtcaggctgaaatatgaacaatattcattggaaattaacaataggacacaattctactcttgtttcagaggcggaagaggagatgcaagagatctgacagaaaaaactaaatgaaaccccagagggccagagagacttgacagaaatggcagataacaaacttggtttgggcttgaaatgtgatctagcagtcaaaggaaagccagtgctattctgggcagctaacaaagaagaattgtgccacggcatagggagttggcaagagcccaccgggagtattacatttagcacagtgtcagcatgatagaaacagaaggtggtgagctctgagagcaactgtagtgctgagggggataaatacatgaatttatgaagatcagttaacaaattcaagcatgcagggttgactgaattccaactacaagatccaggagagacactcccaaatatttgaagggtgttaacattggaagaagagaagaattatttagcctggactacagaactttgtaagaaggtgaaaccaagggcagggcaaatttatacctctctaaaagaaatgccctgatgtagtttttgggtgattcgggtgccttcatccctcaggactttttgtagtatgaagctgtaaggccaaaatgaaggatttgagagttctttctctggagaaatggttgagaaatattttggtcttgtgaataaagagtttttgtcccagagacaggttatgaaggattgatttaatatttattagccatgcacagtatattaagcactgtatacaacacagtacatagttcttgaggttctgaaataaaatgactggccattatatgctttatgcattctcagtgtgtttcagtagtttagaaactttggcaaatttcctaagactttccctttggaatagaatgatggaggaattcggccaaatgtaaatgtaaaacaacaacaacaacaacagatgaaatcctattgaaacgaatgtttcctttcacaagatggcaaaacatatatccttgagtcgggagtttcctcagtgatggggatgaagaagccttgagctgataacacgataacatgtttgttcttcaggatattttaaatgccagatagaggtgctatattgtcttcattgcgggccaggtctctgttatttctcagttcaagataggtcaagggaaaattcgttgattcacttagagacagttctgtttcctgaggcaaaggtacttgaattttcaagtgaaatggccaaaaagcccacagtatacttagatttttttaaaaagcttatatctcttcttttacatctgggcttcttgacttccatctgcttgtctacagaagccatcatgtgattttaaagataatgttgggtatgaagaatgtggagtcaggttctatttaactaggcaattgagtctttcctcaattaactaaattatcttatgctccctgtgtcagtgtggatcctccaagacagacttagaggcataaaatttattgaaccacaaacaatcaattgggagggagccaggagtaggcagggagagctttttgaatatggtgcaagtctaatacctgtgaaggaagaccgggaagaaaaggctgggtaggaaatcttgcagaccacagcatagttgagaaaatcccagccatgcagatgtagagtccccaggcaaaagttgcttgttagcagaatcccgtatggggcaggtgggcaggcactactacccctgccttgctcagtcactggctgggagcagcttaggcaaagagtgctttcagtgttcatggggttggtggctagaggctgaactgtggtccatacaataggttctcttgaagcagatctgagcaacacatcttcttggttactacacttccctagcaagcttatttattcatttcatgacaaggttcaccaagttttaatgtgtcttgccatataacatttacaatagcataataaatactagggaagatagaaataaaagtagaaactcaaagaactaactattactattcctctagataaacaaaaattttctggggtatttttcaaggaggattcacactgaaaatactgagtgataatgacttcattgtctataatactcgtgcaataaatatatttagttgttttattttctaatggctcttttatgtagtgtgttttgagaaaacccaagggtttaacattataacacaactcattgatgataagtatgtggaagctaagattatatggaagagtcaggtagctgacagtctgtatggttagtatggagaatagatctctgaattttcagagaaggaaatggactgaacagcatttaaataatcttgcataaatatgacttctatcaaacaaattttgtgttattctttttttaagagacaggtcttgctatgttgccatggctggacttaaacttctgggctcaagtgatccttccgcctcatgctcttgagtagctgggactacaggcatgtgccactgtgcccagcttataaaacaaaattttggtaaaaagcttgaaacaacagactattcaaaattatattccttaaaatagaaagtctattaacagacccaaaacatatgtaatataagataaaggtggcattttaaatccatggtggtgggtaagattgtggaagataacggattatttagtaaatggtgtagagaaatttgggtagccaatatggaaaataaactcgtctccatacctcacattttatattaggaaaaattccaaatggatcaaatattaaatgtaagaaatggaactgtggtcctagtaaagtactaaaagaaaccatgggagaattaaaaaacataattgtgtatagtatagtgtgataaaatattccagaagccacaaaagaatagactgtattttttttttttaatttcagtaagttttgggggaacaggtggtggttggttacatggataagttctttagtggtgatttctgagattttggtacacccatcacctgagccagacagtaaattcgactatataatttttttttttaatttgggggtaggggatggtggcatggcaaaaactactataagcaaagttaaaagacaagtgagaaactggggaaaatatttgcaactcacaaagggctgatttccctaatatataaagaactctaaaaatcagtgagaaaaacaagaataatccagtagaaataatgggcaaagaatgtgaacagatagtttagaagaaatgaaatacaaatgtcacttaaactcatgaaaataaacacaggctgggcacagtggctcacacctgtaatcccagcactttgggaggccaaggcaggtggatcacttgaggtcaggagttcaagaccaacctgggcaacatggtgacacctgtctctactaaaaatataaaaattagccaggcctggtggtgcccacctgtaatcccaactacgtaggaggctcaggcaatcccttgaacccagaaggcagaggttgcagtgagccaagatcacaccactgcactccagcctgggcaacagagtgagactctgtcgcaaaaaaaaaaaagaaaaaagaaaataatcactgtctaactcttgattaggggaatgcacataaaaactactcagagatactattttgatgtctcagattagcaagtacctggaaatttggtaataaactctattagagaatatgtggggaagcagacgcatgttggcaattacttatctgctgtcttaccacaatagatttgtttgcattttctagaatcttaaacatacaatatgaactcttatctggcttccttcactcagcaaaattattttgagattcattcacgttacagcacgtatcaatagttcattcgtttataactgaatggatatactgcaatttgttatcaggtttactgttgatggacatttgggtggttttcaatatgaggctattacaaataaagctgttgtaaacatccgtgaacaagtctttgtatatacatatgctttcatttttttttttaggtaaatacaaaggagtgtaatagctgggtcttatggcagatttatgtttagcttttattaaaaactgcaaactggtttttaaattggttgtattgttttatattcatgacaatagtatgtgagaattcccatttctccacattttagtcgttctaatgggtgtgtagtggtttttgtgtttaatttgcaattccataatgtctgatgataaatccatgtgcttttatttttatttatctttgtaaaagtgtgggtgtctttttgcctaatttttaattgggttgtttgtctttttgttgtaagtgttctttatatgttctaaatatataaatacattgccacataatatattttgtaaatattttctaccagtctgtttggcacagtgtctttttatcactgtttgtttgtttgtttgagatagagtcttcttctgtcacctaggctgcagtgcaatggcacgtctcggctactgcaacctctgcctcctgggttcaagcgattctcctgtgtcagcctcctaagtagctgggattacaggtgcatgtcaccatgcatagctaatttttgtatttttagtagagatgcggtttcaccatgttagccaggttggtctcgaactcctgacctcaagtgatccaccgcccatcccaaagtcttgggattacaggcgggagccaccacgtctggccttatcacagtttttaaaaaaattgagatataaataatatgccataaaatcttcctttttgaagttcagtggtttttagtatattcacaaggttgtacaaccatcagcatcatctgattccagaacatttttgccatcctctaaataaattcccctacccattagtggtggtattttcctccccccagcccctggcaaccactaacctactttctgtctctcgatttgctgattctggactttcatataaatggaatcatacaatgtatgatcttttgtgtctggcttctttgacttagcacatatcattacttcattcctttttattgccaagtaatgttacattgtatggatatacattttgtttatccagtcatcagttgatgcacatttgtaaaacacaatgtctgtatcttaaccttgaatcctacaaccaagctagactcatattagctttagtacagttttttttgtaaattccataggttttctacatacataattgtttcacctgtaaagacaattttacttttttctttccaatttgattccttttatttcctttttttattgcactgattagaacttgccatacagtgttaaataaaaatacacagaagattcttgttctcaatgttaagaagaaagcattcagtttttcatccttacgtataatgttaactgtaatttgttgtagatgttctgtatcaagtaaaagcgttctgttctagtcttagttttccaacaatttttatcaggaatggatggtggattttggaaatactttttctgcacctattgagatgactgtatggtttttcttttttagtttgttgatatagtaagttatattgattgattttcatatgccagaccaatcttgcattatgagataaaccccacttggttgtgatattattcttttcatatattgctggaatagattgtctaaaaatttgttaagaacttttacatctgtgttagtgagaaacattagtctgtggttttcttctcttactatgtctttctatggttttggtatatgggtaatgcaagccttgtaggatgggttagaaagtatttctccttcagttttctgggagcgtttgtatggaatttgtattctttctttgtttttttttttttttttttttggtcttggttttgtttttgttttttttttcagacggagtctcactctgttgcccaggctggagtgcagtggcacgatctcggctcaccttaacctccacctcccaggttcaagcgatcctcctgcctcagctctgctagtagctgggattataggcacatgccaccatgcccacctaatttttgtatttttagtagagatggggtttcgccatgttggccaggctggtctcaaactcctgacctcaggtgatccacctgccttggccccccaaagtgctgggattacaggctagttcttctttaaatatttggaattcaccaagtaagccttctgggccaggttttgtgtgtgtgtgtgtgtgtgtataggaaggtaaggttttttgtttgtttgtttgtttgtttgccctgttacccaggctggagtccagtggcgtgatcttggctcactgcaacctcttcctcctgggttcaagcgattctcctgtctcagcctcctgagtagctgggattacaggtgcctgccaccatgtctggctaatttttgtatttttagtagaggcgtggttttgccatgttggccaggctggtcttgaactcctgacctcaggtgatctgcccgccttggtctcccaaagtgctgggattacaggcgcactgcgcccagccaggtaaggttttataaaccacaaatttaatatctttaataaatatttctatatattctatatttatagagctatttagatttactcttgaatgacctttgtgcctttcaaagtatttgttgaatgtcttagcaaaaagctgttcataatttttcttttttctttttcttttttttgagacagggtctcactctgttgcccaggctggcatgcagtggcatgatctctgctcactgcagcctctgcctcctgggctcaagccatcctcccacttcaccctcccgagtagctggggctataggcgtgcatcaccatgccaggctaatttcgtatttttttaggggtggggttttgccaggttgctcgggctgatctcaaactcctgagcttgagctcaagtgatccacctgcttcagcctcccaaaatgctgggattacaggtgtgagccaccatgcctggcctattttcttatttttattttaaaattgtagaattctagtgagggttacctctgtcattcttgatattattcctttggatcttctctctttttctcctgatcggtctgactaaatgtttatgtagttcattgatcttctcaaagaacaccctttggttccattgattttctctattgcatttctcttttttattttaaaatttctgctgtggaaaaaaatcttctgtttgcttatggtttgttgattctttttctagtttcttaaggtggaaactgaggttttttatctgagacttttcttcttttctaatagaggtattttgtactataaatttccctctaagtgctgctttaggtgcatttttgatttgctgtgtttttagtctgtttaaaatatttttaaattctcttgttccttttactcctgggtaatatggaagtattgtatataatttcaaaatatttgagggattttccagacatgtttctgttttttaatttaatttcattgtgttcagagaacatactttgtatgacttgaattcttttaaatttatttaaattcgttttatggcccacaatatattttatattgttaaatgttctgtgtaccctcaaaaagaatatgttttctgctcttgttgggttgagtgttctataaatgtcaattaggtcaagttggttgttagtgttgttgaagtcttctgtatctttcctgctttttctatttgtcctatcaattaataagagaaaggtattgaaatttgtagttagaattgtaggtttgtctattccttttggcagttttgtcagtgtttgcttcatgtatttgaaacttagttatcagatacataacatttaggattatgtcctcttgatgaattgacttctttatgattatgaaatgatatcctttagtcctggtgatattctttgttctgaaatatactttacttgatattaatatggcccttttagctttttttttttttttttgacagagtctcactctttcgcccaggttggagtgcaatggcgagatctcagcccactgcaacctctgcctcccaggttcaagagattctcctgcctcagactctcgagtagctgggattacaggcacccgccattgtgcctggctaatttttgtatttttgtagatttcgtagattttgtagatttttgtagatgttggccaggatggtcttgaactcctgacctttgatgatccacccgccttggtgtcccaaagtgctgggattacaggcatgagccaccgtgccctgcccagctttcttttgattaatattagcatagtatatctttttccattctttttctttcagaatgattttatctttatatgtaaagtagatgtcttataggcagcatatagataggtcttgcttttatgtagtctgacaatctctgccttttaattgggatgtttagaccatttacatttgatgtgattattcatatggatgtgtgtaaatctgccatcttgctgtttgttttctatttttcccacctcttctttgttctcgttttcttcttctgtttcttttggattaattaagcatattgtaatcattcagttttacctccatattggcttattactttttatttttgttttgagatggagtcttgctctgtcacccagactggagtgcagtggcgcgatcttggctcattgcaagctctgcctcccgggttcacgccattctcctgcctcagcctcccaagtagctgggactacaggcgcctgccaccacgcccggctaattttttgtgtttttagtagagacggggtttcaccgtgttagccaggatggtctcaatctcctgacctcgtgatccacctgcctcagcctcccaaagtgctgggattacaggcatgagccactgtgcccggcctggcttattacttctaactctgtttccttttttgtaattgttttagggtttgtggtgtaaatggtgtacatctttaacttatcagacacctccttcatgtgatattacagcacttcacatatagtatgtcaatcttatgatagtgtacttccatttctttccactcagccttcacattattattgtcatacattttagttctgcacataactccacagtacctttttatttatttttttataaaaaccttcaaggatatctaaataattgtaaaaaatgtttgtatttaccatttttggtacttttcattcttttgtgtagatctgtctttccatgtggtataattttccttgtgcctgagggacttcctttaatgtttcttgtactgcaagcctggtagtgatgcttttttccagcttttatacatctggaaaagtctgtattttgcctttgtttttgaaggatatttttactgggtatacaatattaggttaacagggttttttcgtttcggtttttaaagatgtttcattgctttattgtcacttgcatggtttcctatgagaagtctgttgttaaccatactttttttcatttgcacataatgtggggttttttcccctctcgatgcttttaagttttctttatcactagatttgagcaatttgattgtgatgttccttggtgtagttttgtttatacctttgtgcttggggtttgttgaggcttttggattaatgggtttgtagttttcatgaaatttagaaaactttcagccattattctattttctataccccttttcttacctttcctttggagattccatttatatgtaattagaccagttgaagttgccctccagttcatgaatgttctgggtttgttttattttgttttgttttttctttttctttttttttttgagactgacttttactctgttgcccaggctggagtgtagttgtgcaacctccacctcctgggttcaagcgattctcccgcctcagcctcccgaatagctgggactacaggcacgtgccactacgcctggctaattttgtatttttagtagaggcgggatttcaccatgttggctaggttggcctcaaactcttgacttaatgtgatccgcccatcttggcctcacaaagtgctgggattacaggtgtgagccacctcgcctggcttaagttttttaaatgtgatttttaaatgactccataatgtgttccacttggctgaatgtctaagattttcttcctttttttcattaatcgaaataatagtgtgatgaacatttgtatacaaaaatattagtatacatctgtgatcattttcttagaataaatttctccttaagacttttaatatgtgttgcaaaatgctgtccatatatttttgtatcacataaaaaacaaaaaactcctggctgggcacagtggcttacacctgtaatcccagcactttgagaggctgaggtgagtggatcacctgaggtcaggagttcgagaccagcctggccaacatggtaaaaccccatctctgctaaaaataaaaaaattagccgggcgtggtggcaggcgcctataatcccagctacttgggaggcagaggcagaagaatcgcttgaaccaggaggcagaggttgcagtgagctgagatcatgccattacactccagcctgggtgaaagagtgagacgccaactcaaaacaaacaaacaaacaaacaaaaatcctcctatgaaaactgctagttttaatggcaggggaacattcaactacttgaactcctattctttaggagggccaggattgcttgcttgacaccagtatatcagaattttaaagtgaaacttaaaggctaagaagaaactcaccatatgaagaataggggaaataattacaagcagaatgaactgcagtgcaaagcctcaagatacaagggatgttagaagaatggagagaaaccgagggtagctagagcatagtgagaaagagagtctgtcctaaaaggagattgcagagaggcaaggactggatcatgtaggaccctgagggtcaaggcaactatgctttggactttattctaagtgccatgataagccattgaaaggctgtaagctggggagtttatggtgttgtgtagaggaaggtggtttagagagtggcaagagtggaagcaggatgaccagctagaagatacgattctttactatttctcgatcactttatcatatatattaacatatgttactgctatggactgaatgtctgtgttcctcccaaattcatatgttgaagccctaattcccagtgtgatggtattaggaggtggggcctttgggaggtagttaggtttaaatgaggtcataagtgtggagtctccatgatgggattagtacccttataagaaaaggaggaaacaccagagcttcccctctccaccatatgaggatacagcaaaacaatggctagttgtctgcaagccaagaagtgggaccttgctgagaaccagatttgttgcacgttgatcttggccttcccagcctctagaactgtgaggaataaatgtctgttggttaatccacctagtctgtggtattttattatagcaggtcaagcagactaaaacatctaggaagtgataaagaagaaaatatatatctgagacggagtctagctctgtcacccaggctggagtgcagtggcgcgatcttggcttactgcaacctctgcctcccaggttcaagcaattctctgcctcagcctcctgagtagctgggattataggtgcccgccaccttgcctggctaatttttgtattttttgtagagacgaggttttaccatcttggccaggctgttcttgaacttctgacccggtgatccacccaccttggcctcccaaagtgctgagattacaggcgtgagccaccgtacctggccaagaagaaagatattttaatattttaatttattattattattttttttcagactgagtcttactctgtcacccaggctgtagtgcagtgatgtgatcattactcactgcagcctcaaactcccaggctcaagcgatcctcctgactcagcctccccagtagctggtactacaggtatgcaccaccacacccagctaattttttaatttttcttttgtagagacgaagtctcactgtgtggattagcctgattttgaactcctggcctcaagtgatcttcctatgtctgcctcccaaagggctgggattgcaggcatgaggcaccatgcccagctgagaaaactattttaaaagtaatgggaaactatcacattattccctttggctagttatgctgcatttcctgatttggctttgtttgtttgtttgttttgagagagagtcttactctgttgcccaggctggagtgcagtggcacaatcttcgctcactgcaacctctgcctctcgggttcaagtgatttgcctgtctcagcctcccaagtagctgggattacaggcatgggccaccacgcccggctaatttttgtacttttaattgagatggggttttgccatgctgaccaggctggtcttgaactcctgaccttgtgatccacctgtctcagcctcccaaagcgctgggattacaggcttgagccactgcgccctttttttgttgttgttttttgttttttttgtgagacagggtctcactctgttgcccagactggtgtgcagtggcacaatctcagctcaccgcaacctccacctcccaggctcaagtgattctcctgcctcagcctcccaagtagctgggattacaggcgtgtgccactaccacccaactaatttttgtatttttagtagagatagggtttcaccatgttggccaggctgctcttgaactcctgacctcaaatgagccacccgtctcggcctcccaaagtgttgggattacaggcatgagccaccatgcccagcctgatttggctttctaatgctattgctgcatacctaacatttttcttctattttatgacatccctaatcagtatttaagctttgaatgtttattctcctgttttgcctagataatttgtttttctcctttattttcttaaatacatggaatcttttattatgcctctaatatagtgttctcaaactgacttgaatgtggattttaaattttttaaaatgaaatatctgcctgggacaccctttgaaaagctaggccagaggattgggttccagtgattaccaaaggcttatggtcaaccaaatgagagaatgcagtaaaagaattacaaccaaatgcaaccaaagcaatgagagaataccttgcaggatctggtcctggaactgctattaatgttttttattttgttttgtttgagatagggtctcattctgttgctcgggctggagtacagtggcgcgatcacagctcactgtagcctccacctcctgggctcaagcaatcttcccacctcagcctctcaaggagctaggactacagggcaagtgccaccatgcctggctaatttttttttattttttgtacaaataaggtctgcctatgtcgcccagactggtctcaaactcctgagctcaggcagtcctctaccttggcctcccaaaatgctgggattacaggcatgagccatgagccaccatgcctggtctattaatgtctgtagattgatttcttagataatgatgtagagattatgttaatcatgaatatggatgtgatattacaccaaggcaggaatgaaggcaattttgtgagaggggaatggggctttggaatctgtgaatcaggttaaaatcttagttttagcctttgctaggctgagtagcctttggcaagttgcctaatttctttgtcttcagtttcttcatttgtaaaatgaataggatgacacctactttgtgtggtttttgtgaagagcagataagacgtataaggtataaatttctttatccacttttattgttgttctgtaccatcttggaagatggggatagaatctgttataatgttaataaattggagaaggggcaaagcaaacaaggaaatttagtgagaatagttctgaataagtataaatatagcatgtaggatcaacagagtatagggttttttacttggatgtttggaaccttgggaatagaaaaccttttttaaaaatttaatttaattttttaaaagacagatgaggtctcactctgttgttgccgaggctggagtacagaggcacgatcataggtgagcttgagctcacctcctgggctcaaggaatcctcctgcctcagcctcctgagtagctgggactacaggaatgcaccagcgtgcttggctaatttattttctttgtacaagtgggttttcactatgttgggctggtttcaaattcctggcctctagtgatcctctcaccttggcctcccaaagtactgggattttaggcgtgagccgctgcaccctgcccaaaagctgttctgtttgtaatagtgaaaaatggaaacaataaagtaacaaaagaatgattaaatgaaccatatgtagtacactcatgcaatgaaatattttccagtctttcaaaagaatgatacagatctatatatttggacatggaaaggtttccaggatactctggtacattttttttttttttttttgagacggagtctcactctgtcgtccaggctggagtgcagtgtcgccatcccagctcactgcaagctccgcctcctgggttcacgccattctcctgtctcagcctcctgagtagctgggactacaggcgcccaccaccacgcccggctaatttttagtagagacgaggtttcaccgtgttagccaggatagtatccatctcccgacctcgtgatccacccgccttggcctcccaaagtgctgggattacaggcgtgagccaccacgcccggcctctggtacattttttaaaaaaggaaattaataaaccacttttgtagtaggatggtgtatgaccatatttgtattttaaaaattatgttatgaacatgtctatgaactcatagataaaggtctggaagggtgaacttcaaatcgttagtcatcataaacaacttctataccttaggcttgcataaataaaaatgagactgaaaaggtactgtaagaagccatcagagattgttttctaaatatgatataaaacccattattcacaagaccaatacattatttacataaaaattaacctccaaatatgggaaacttccagcagttctgaattgatgggttttctattagaatcctatattttttcattctaaaacatagattattaaaagatttgcatatttttaatgtataaaactctgtgcggatgaaggggtgagaagacgaacatttttatacaccctgatagaaatataaatcggtgcttttctggcgggtactttggcaatagagaacatgttatctcttttgacgtagagttctacttataggaatttattttaatgaaaaacaatcacagacataaagatttagatttagcatttattgcattgttatttataatattataaatttataaacaacaatatctgacaataaaggattttaaataaagtaggatacatttattcagtggactactagccacataatatattgtagaagtgtaaaattgatgcaacgtatgttgttgagtgcttactatttaccagatttgttctaagtacattattatttaatcctggccgggcgcagtggctccatgcctgtaatcccagcactttgggaggccaaggcgggcagatcacgagctcaggagttcaagaccagcctggccaaaataatgaaaccccgtctctactaaaaatacaaaaattagccaggcgaggtagcacacacctgtagtcctagctactctggaggctgaggcaggagaacctctcgaacccgggaggtggaggttgcagtgagctgagactgcaccattgcactccagcctgggcaacagagtgagactccctgtcaaaaaaaaattttaatttaattaaaaaatatatatatatataatttaatccttagaataagcagtgagacaatcatttcttatttcattttacatataaagtaacttgggcactgagagaggttaaataacttgtctaaaatcacatagggagtgggaaagctgggactcacttttatctgcctgacttcaaaattcatacctcaattactatatttaatgattttataaatataaaaatatggcataatacttacataaaaaaagttataagatgatatcattgttttgaagaaggatttattctaaaatgtcagcagtggaaatagttgagtattgggataatggttaatttttgtctcttcttttattattgttttccacagtgaacatgaatgactttcataactacagtttttaagagatactcatttcatagcagaagggtggagtgtattaaaaaaataaatattccttcttcccctctgtttctgggtgtatttctgagatatatttctgagtttgggtgtattcactcctgaagttgcatgtaattgcctcttggcactagtttataaaaactagaaagttgaaacagtgatgttattctgagatctgaagatgtaggcagatgaaatatgtttaaataatgacattttaaccattattcagtttcctagatctgggaccggggccactggtaacaggattcagaagccagaagcacagtaccacacagtgagcaattccccagactcgtctctttgagcttttcactagaaaatccttcttcacctctcctttctcccaattcctttttattaagagtcttttaacctggatgaacataatttgagccgatcataaacaaatagctctcttttttgcctgactttatgcatttctgttgccatgtaaaccaaataaagctagctgtgagcaaaccagctgctgcctgcagcctccttccctagaggaagggaaagggtggtgaaggtaattgggaaggactataagaagggtagaaattgagggaagagagtattctatttacatttctggtcctgattctcactctgtttatttggctatttagaatatgatgactatagttgacttagtcattcttcccagcagctgagagatatgggtgactaataattttttctctatttgtttgcatgttggaaatggttactattgaggggtggaattaatagagtctaagctatatttcagaactggaaaacttggaaaatgaatggttgtagggaatagcatgggatttatgattttttgtttcaaagagttacgctttgggtactggcattaaaaagtagttccaggggccaggcacggtggctcacgcctgtaatcccagcaccttaagaggctgagtccagaggattgcttgaggccaggagttcaacatcagccctggcaacttagcgagatctcatctctacccaaaaaaaaaaaaaaaaaaaaaatttttttttaagttccaaggtgtctaattgaatgtgccctagaggcactgtgcaaagactacatataggtggtcagtgactgtcaagtatttacactcacaattgaaaggacatgacagctgaggcctaaatcacatgacgtagtaactaggtaagtacttggaatcattaatgaaaagacaatgaggtgtttgcttaaattataaatattgattaggggtagtagaggtaatacgttattatgagaagagaaaagtgagtgtggcagttactcatttagttcagatatggggaaaaaaagtcatctcttctctgagctcaggaaactttggaagtcaatcagcatcagatacaccaatcctcagaccctatagtgccacccaaaactaaatattctccttcagatggtccagttcatccttaagctaggaaagagcaaaaattaaataagaagaaacattgtaataatcttaagtttctcactgggctgtaaggttgatagtgaacttatgtgtaaatatccaaaaacatttttttgaaaaaacatttttttcatggcccagtcttcatttcttattgtctaattatacacatatgagtaatgcatgtatttattcctatcccctttttcttacacaatagggtagtataatatgaaccttgcttttttcccatatgagtacaaagaaagtttcctctttttatagctgtataatattctgttgttggatgtacctcagtttatgccatcagaaccctgttagtggatagttgagttgtttcaaatcattttaagctgtaattttactgactttaagtctcttttgttagcaatcccactttgaggccaggctacagaagttagtatatagaaaacaaatgaatataagtaaaaaactacaaatccaactttagttctaatctgggctgtgggaagatggctgcctaacttcaaagttatgctaccttcatgcagtcctctctattttgtttttctttgctgccgtctatgtatttggtgatgtttggtttgttgtcttctaatttttctttcatggttacttcctgatcctatctaatacaccagccttcctaactcctagttagagctttgttagaaaattgttagacatgcagatctttggattttactgtcgacagacgatagcagttttcagtctagatgatgatgggattcctcctatctaccttgccggaagctctgtgaaaatcttaatacttggataatgcacttctactatcactgcttccctgctaacaaagtacacttggtaacaaatttgtattagtgatacttaactgccccaggaggctggtacctgctactgctggtgggatgtcaaaatttcttcctgctcagtaggggtagagacaagcagaattgagaaatgctgtttaaatctgtgaatttaaatctgggttctttggaggaaggcataaaggggtgattgattaatatcattttggctgctcttctgccacaaggaatatgagtagaataaagaaaggaagaagaagatacaaagaaattcaggttagagaagaaacactacattgagaatcaagaagcatggattttgatctgtattgttactaatttggtctgtgatttgatctatattctgttaatgatttggtctgtgatttcacttctctggtcctaagtttttgacctatgaaattagtggtttggaatttttttaaaaattgtctgaaattctaaggcagaaaagagaagtaaagcagcaggccgggcatggtggctcatgcctgtaatcccagcactttgggaggccagggcggaggactgcttgagcccagcctggacaacacggtgaaactctgtctctacaaaaaataaaaataaaaaaattagcctggcctggtggcacatgcctgtagtcccagctactggggaggttgaagcaggaaaatcacttgagctcaggagttcaagaccacagtgagctatatgatcacatacctgcactttggcctgggtaacagagtgagaccctgtctaaaaaaaaaaaaaaaatccatattgttattaaataatataaagaggagagcttgtctgttaaagaaaaatacctattacagttagtgttgttgcatagcaaattattcccagaatttaggggcttaaagtaatcgtttactttgcttctgattttgtgggtcaggattatgggaatggctcagctggataattctcatttcgggtttctcatgaggctgatgtcagatggggctacagtcatctgaaagctcagttgggctacatgtccaagatggctcattcacatggctggcagttgattttggccatcagtcagagtgtctgcatgtagtctttccagcatgatggtctcaagatagtcaggttttttacatggtggctctcttctaccagcgtgtcccaaagaagaccagacagaaactgcgtgacttttctgaccttgtcttgaaagttacgtagcattacttcccctgtactgtattggttgaagcagatacaagcatgcccagattcaaggggacaggtcctaaatcccacttccgtgagaagaatgtcagagaatttgggggccacgtgtttaaaactgccacattttctcttcatagagtagatggcttctattgagaatagcacataagtactgaagtttcttttcttttcttttctcttctcttcttttctcttctcttttctttcctttttttttttttttttgacggagtcccactctgtcacccaggctggagtgcagtggcatgatcttggctcactgcaacctctactcccaggttcaaacgattctcctgcctcagcctcccaagtaactgggattacaggtgcatgccaccatgcctggctaatttttgtatttttggtagagacagggtttcgccatgttggccaggctggtctcaaactcttgacctcgagtgatccacctgcctcggcctcccaaagtactgggattacaggcttgagccaccccacccagcctgaagtttattctttctttttgcttggttgaagcacaaccaagcaaaagaaatgtgtttaaaattatgatcacagaataagtgttacaaatttttcagtggtaacttaatccagatagtaataacccatacattaatttcttgcctttctcttgtatggagattatgcacaggagtttggaccttattctgtagacagttgggaatcacttgaggcaggaagtatagaagttgattagaaataggtaagactggaggcaaaaagagtagcgccaattcttttcttccccaagcagtgcaggtgagcagtgagatccagaactggggcagtggcagttgggatagagagatgtttaattcaagacatagtaaaacattaataaaacgtaattttttttttgagacagggtctcactgtcacccaggctggagtgcagtggcacgatcacagctcactgtagccgcaatcccctgagctcaagcaatcctcccacctcagcctcctgagtagctgggactgcaagcgcaagccaccgtgcctggctaatttttaattttttgtaaagacgggtgtctcatcatgttgcctaggctagtctcgaactcctggactcaagtgatccttctgccttggcctcccaaaatgttgggattacaagtgtgaaccactacatgctggctaacatatttgtaaagaaattatttatattcgaatagctagtaaataaatgaacaaaattcaaaatgttcaaaaggatagataataaaaataagttttttatcatctcttctcccctacttgcccagttttcccctaaggctatcactattactatttttttgagtgtatttccagagattctatgcatatacaaacttacttttatcgtactgtattcactattctgtaccttgcttttttcacttaaaatatatcttggagatagtttatatcaaaacatatatagctgccttgctgtcttaactatagaggattccattgtatagataggccgtaatttatttatttatttttattttttatttttttggagatggagtctcgctcttctcccaggctggagtacagtgacgtgatctcagctcagtacaacctccacctgccgggttaaaacaattctcctagttcaggctcctgagtagctaggattacaggtgcacaccaccacgcctggctaatttttgtattttagcagagacagggtttcatcacgttggccaggctggtctcgaactcttgacctcaggtgatccacctgcctcaacttcccaaagtgctgggattacaggtgtgaaccactgtgcccgtccatgccataatttaagtcagtcttctataaggatttaaattattttcagtctttcttttctttgagatggagttttgctcttgttgcccaggctggagtgcaatggcacaatcctggctcactgcaacctccacctcccgggttcaagcgattcttctgcctcagcctcccaagtagctggaattacaggcatgcgccaccatgcctggctaattttgtatttttagtagagacgggggtttctccatgttggtcaggctggcctcaaactcccgacctcaggtgatccacctgccttggcctcccaaagtgttgggattacaggtatgagccaccgcgcctggccagtttttctttacaacaaaaatgctttaatgaatatcttcattatttcatacatggggaagtatatctgtgggacagattgctagaggtggaattgctgattccaaggatgtatgcattgtacttttttttttttaagagacagggtcttgctctgtcactcaggctggagttcagcttactataacctagaactccttggctcaagcaatcctcctgcctcagccttctgagtagctaggactaaaggtgtgtaccaccacgcctggctaatttgtaaattttttttttctgtagagactggaggtcttgctgtttcccaggcatgtgtcaaactcctggcctcaagtgatcctcctgccttggcctcccaaagaactaggattacaggagtgacctgctgtgcctggcctaccttataaattttgatagatattactaaatggcttttcatggagaatagaaaccagtttatattctcacctgcagtggatgtgagtagctgtttcctgcaacttcattagcactgtgttatcagactttcggatctttcctgttctgatggatgaaaggtggtatgtcattgaagtttcaatttacatttctctttaaggccatttgtatttatttctctttctatgtaaactggtgacatgctctgcgtacttgcctgttggattgttggtcttttaaaaaatcaatttgttggagctttttgtatattgaagaaaaaggtcctttgtaatatgaattgtgaatatttcccccaatttgtcatttgtcttttgattttaatgtagtttaatagagcttaatttcttaatagtgtcttatgtagtttgtgtcacatataggccctgtccactttacgattattttaagtgatgggtctctttcaaatttctgcacatcctttgtgttcggatctcacttcctactttaatggaaaaatagaagctattaagactttcaacttgctcctttccttttatttggaaaggcatcctgtttcctaagttggtattgatttgttatctaattctcagtgcccttattatatttcagtgatgttgccacattgattcttcaacttctccctcggttctaacttcacattagccatttaggttcttgtctcttatgtttgcttatttgtttgttttaaagaaccagttctaggtgtagaaaaacagacactcatacgttcatggtggaagtgcaatcttggtgcagtcaatttggagggcagtttgagagttaatatctctcaaacctaaaaatgtatgtagtctttgaccaaattatttcactttttagaaatgtaccctattgatataccaaacatatatgaaaagtatatacaaagatataagttactgcagtgtttgtgatagaagaagactggtaactatctttgttatatttttcagtagttatgtatccatctatgtttccatgcctttaatgcagccattaaaattcacaccattctggggactattttttgccatttttcttttcatttttagagacaggatctctcactgttgcccaggctggctcatcgcagcctcaaactactgggctcaagcaatcctcccacttcagcctctctggtagctaggattacaggtgcattctgccatgccttgctaattattttttttttttagagataaggtcttgctttgttgcccaagctggtctcaaaatcctggcttcaagtgattttcccacctcagcctcccaaagtgtgggactacaggcatgagccacctcgcctggccactaattgattttcttttagaattttgaaggagtacactgttatccagttttgctcttgttgctctctttttccttttcctctgctcttttttttttttttttttttgagacggagtctcgctccgtcgcccaggctggagtgcagtgacgtgatctcggctcactgcaagctccgcctcccgggttcacgccattcttctgcctcagcctccctagcagctgggactacaggcgcactccgccacgcttggcttattttttgtatttttttttagtagaggcagggtttcaccgtgttagccaggatggtctcgatctcctgaccttgtgatccgcccgccttggcctcccaaactgctgggattacaggcatgagccaccgcgcctggccccttttcctctgttctttatgactttctgtcctgatctgccagtttaaaaaaaatagtttttcaggccgggcgcggtggctcacgcctgtaatcccagctctttgggaggccaagacgggcggatcacgaggtcaggacatcgagaccatcctggctaacacggtgaaaccccgtctctactaaaaatacaaaaaaattagccgggcgtggtggcagttgcctatagtcccagctactccggaggctgaggcaggagaatggcgtgaactcgggaggcggaacttgcagtgagccgagatcgcgccactgcactccagcctgggagacagagcgagactccgtctcaaaaaaaaaaaaaaaaaatttctcccctttgtcgttttatctactgtttataaaattgtttttaacttcctcttccaattcttctgttgaaattttaaattccattatttttaatttctaagaactgcttttacccatttgagttttttaaaaattatgaattgttgaattttatcaaatgctttttctatatctattgagatcatatgatattttctcctttaatccattatggtggtaattctacaaagtagtattttaaatgtttaatcactcttgaatactttggataagcttatatgatcatgctttttttacattgctgtgttagtttgctattttgttcatgagctcatattttgtatatatatctgtgtccatgattgaaatcagtatataattttcctttgttgtactgcccttgtctggttttggaatcaaggttatgctggtttgatcaaaagttggctggggctgcaaattatactgacaaaagacaaattaacaagagaaaaacaaagtttttcttttcttttcttcaaagtttatgcatggcacatacataaggagagctcagtgatgagtaactcaaagaggtagttagaacttggggttacatagcatcttagcaaagaatagaaattttttagagaagtgacaagacaaaggaaaaggacattgagcttctaggggtagcaagtgtgggaacacaaatatatggagaaactaggtagataaaggctagttagcaaggtttgtttgtgttgactctcagtgccatcctttctccagtgatgaggctttttatctccttcctggtaagggaagtggttgggggacactttcacaagggtagaggaaaggtggatgtggggagggaggctgagaacttctgtgtctgctttttctcaactgccttcagtgtgaaatagttcttatgccagggtagcatactctgaaccccttcgttagaattaactaaaagcatagcatataattctttggtaccacttaccagagaaagaaagggaaagtataggaatgaagagatctggcggcggcagtggctggcagggtggtgatggaggtgggaggcagatgaagatggaatggaggactgagtatgtgtaagtcattgatagcagtaaaagtgactattgtccccaaagctttcttgtcgaatgcctgtgaatttcgagggtgggaataacacactcatggttatcatatgaaacctatttgtggcaagatagtagaaataaaacaaactgtgtaatctgtccacgatcttgagaatttaccaacacttgggaaaaaatagcaagtgcttaaagagaagaatatcagtgtaaaggagcatggactacaagtctgttaagtggtacaggcagtaattacaaccattaaaccactcagaagaatggtttatctccagggttataaaggtaaagctttatgtgggaaccagcatgtactttggcattaagagaagggaaggagaacagaaagtaaatagaaagagtttaataagaaggagacagagcaggcattttaaactgaggaaattatatgcaaaagtacaggggtggagttgggaagggacaccagtgttgaagtattcctgttacttgttggtatcatcattcaccctatcagctggtaggagagcaccagaaacccaagtcttcttagactcctcctccccattaactcaaaggtaatatccagaagaaacaaagaacatttgtggaaggagagtaagagtcatgactcagttttgatcctaagtgaccagaataatagattttaaaaatatatgggtagggaggtagtttgaaggagacaataatgaagagagagaccctttcctttaaaataggaataaagaagcaaaaggtaggtgaatataccaagaacttccaattaaaagatgagggaacttgtagtaatctcccttctgtgtgttagagaatgcggctatgtagctttgtaccttgagggacttaacaagggttaattataatcaactgttgaaacacactgttctaaacgcagtattattcacttgccacctattttgggagttcatgtataagcatataaaattaccattagactgtttcaaagtggtagaccttattttaaagtaagagcatttattttacatgtttaaaataagggatatgtaaatctttcctttctccctactcacctctgttcaccacaggcagtcattgttgacatcatcttgtgcttcattctagaaaaatttggcatatatgtatataatattacacgttatgtgttacaagtatatattaacatacatatcttgataatgtatttatactatgtatcttgaaacaatttcatttacatcttttaattatgtgaaatcttttctcttttcctttggcctctggccccatttcctttatatagggaagtatactatggggatataaattccaaatacctgttttgtttgtctatccaattttctatttcattgcattcacattggattaaagttgcttaaaatagcaaaacattttccttttttatttaaaattttttgtcttaaaaagcatgaggagaaggcatggaaatattagtcacatttcttggtattcaatattcctgtgagtagtgtttattaaaagctcatctttcttgcttggcatatccgtacagtttcctcccactagagggcactaggatattgtttgtttttagtggtctgtttatgatgaacttagcattaattttcatatgttttcttatttgtcctgcattataataggaattaaattgtcatgctgatgtcactttgttagcgatatatggacaattaaggcaccttccctgctatcaattatgacttcgaagactattttgtgcttaatacttaagaagaaagggagagggggagcttagagcaatgggaagttccagaaatagacctctacctatagaatgaactggattttgaaaaagaagccaagataattctgtggggaaaaatttttctttccaacaaatggtgctggaacaactaaatactgtttgggggcaaagtgaactttgtttctgatctcattccaagtatagaagttaactcaaaatggatcatagactatagaaaaaaacaaaggagaaaatcttcatgaccttggggtaggcaaaactttctttgcacacaaaaaatactctaaaagaaaatgttttgatagagttctccaaaattagaaacttctattcaaaagacacaggtaagtaaataaaaaggcaagcacagactgggagaaaatattcacaatacatatacagaaaaatgactggtatttagaattcatataaaggaatctaaaactcagtaataagataatctagtttcttaaatggaggaatgatttgaacagacatagcacagtacatactatatgaatgctaataagcatataagatactcaacaccacgagagaagtgcaaattaaaaccacagtgagatactgcacacctgctagaatggctaaaattaaaaagagtgacaatagctactactgatgagggtgtgggacagttgtaatgatcatgcattgctggtgtgaaacagtttattataaatttaatatattcttaccaggtgacccagcaatttcacccttacctatgcatttacccaagaaaatgaagcccattgttcacatgaagacctatacacaagtgtccatgacagtttgattcataatggccccaaagtggaaacaacaccacatgtccatcaataaatgaatggataaataaagtatggtacacccatgtaatgtgctattcagcagtaaaaaagaatgaactactcatataacagtatggatgaatctcaaaaacattaaatgaaagaagctagatataaaagagtattttatgattccatatgatttgtatgacgttccataaaaggcaaatctatctatagtaacagaacagatcagtggttgcctcgggttgtgatagtagtgagatgagtcagcaacaaaagagaaaataaactgaagtaaccaaaaattataagtgttatgaaggaaacaaagcaggtggcagtatgtataaaggccctaagttggaaaagaagactgttgatggagtatagtgaacaaaggagtgagtggtgggagagctaaataagctaccaggtcatgcggaaagagtccttaaaaggggcaggaagcggggaggaaaaaaaagagttcttactaacttgacagggaacagactgtagctcaaatagaaatccttccttcagctgggcatggtggctcacacctgtaatcccagcactttgggaggccgaggcgggtggatcacctgaggtcaggagttcgagactatcctggctaacatggtgaaaccccatctctactaaaaatacgaaaattagccaggcatggtgacaggtgcctgtaatcccagctactcgggaggttgaggcaggaaaatcacttgaacccaggaggcagaggttacagtgagccgagatcatgccactgcactccagcctgggccacagaaaaaagaaaagaaaaattctgccttcagtgggagagggtaagaaggaagctgtgcatatgaggtttgcctggtgattggaaagggagagagtttacatcagacatttttctgttttcttacatttattttcttttttatatataaagtaagtctgccacctgaaggtgaagaagttgaggggacaaacatacagtattctttttgggagaggataggggagtatgtgcctactaaagaaactttgtaagatgactgaagaactatcgatgctcattagatgtttaggaaggtgattttaatatgaaacctgtcagcttagtcacacatggtttttctcttgcaacatgtaactgcttgggcccaaacatggaattaattagtatatgtcatcagaatttaggttttgcctggcaaaaataatgaagagagtgaaggtgttgttgtggttggcttgctttagtctagaccgttgatgactgagtgaaggtgtttctagagtcacattatcaagatggacaggaaatctaggctagaaaagaaggaaaatgaaactgggaaagagttcatgaataggaagacaatgataggatcattggctggagaacacagaattatatactggggccatttctgcaaatgaagtggtaggataggatgaagtgatctcagagtgacttccaggtttccgaaatagaggctcaattattgacataggtaatcctagaggaggaagagcaggtttgggggggtaagatgatgagttcagttttggacaggctgtgtttgaggaacctgtgggatgtataagtggagatgtccaatgagcaattaagtatatagatctgagagatctgggctgtctaagtagagatttagcagttatcagcatatagatgataactgaaacatggtaacagaaaagattatcagagaggatttgtgggataagagaaggtaagggtgtgtaatttcctttttctacaaccagagtggttgtggtggtggttggtatttggttttgttccttttccttcagtattgtgtctcctttttcaaataaatcctaggaaatacaacatggaatgatggtaagagcagagttaaagtcctgtctttgctgtttcctactatgtgccttgagtagttaaacttctcagagcctcagttttttcaactgttaaaaacagtggtatcaaaagaatgagaagacaaaccacagacggagagaaaatatttgcataagacctatatgataaaggactgttatccaaactatgaaaagagctcttaataataaggacacaaacaacctgattaaaaagtgggcaaaagacatggatagaaaactcaccaaagaagatatatagatgtcaaataagcatctaaaaagatgctcaacatcatatgtcattagggaagtgcaaattaaaatcatttgaaataccactactcatctattaaaatgccaaaattcagaacactgataacaccaagttatcaacacctaatgaggatgtggagcaaaaggaactgattcgttggtgggtatgcaatattatacagctacttaaagacagtttggtagtttcctagaaaactaaacatattcttaccatacaatccagcaattccattccttggtatttacctaaaggaattgaaaacttatatccacacaaaaacctgctcacaggtgtttatagcagctttatttataattgccgaaatttggaagcaattttaaagatgttcttcagtaggtgagtgggtaaataaactgtggtacatccagacaatggaatattattcagtgctaaaaagaaattagtgatcaagctgtgaaaacatatgatagaagctgaaatgcatattactaagtgaagtaagccaacctgaaaaggctacatactgtatgattccaaatatgtgaccttctggtagaggaaaaatatggagacagtgaaacgatcagtggttgccaggggctgggagaagggaaggataaataggcaaagcacagatttttagggccgtgaaatcatcctgtataatgctacaatgatgggtacacatcattatacatttgtctaaactcatagaatgtataacaccaagagggaacccaaatgtaaactgtggactttgggtgataaagatgcgtcagtgtaggcttattgattaactgtaacagatgtaccactctggtgcaggttgttgacagtgggggaaactatgtctttgacgggcagagggtatatgggaactctctttctcctcaattttgctgtgaacctaaaactgctctttaaacgtctatttttaaaaacagaacagctgtgatatgaaactgcatggagacaggtcaaataactaaggactactggtctaaattcagaatcaccctcagctgtataggtatttatgtgttcacttgtggcttagcttactgctgcttaatgggaaagttttgcttcccttcctcacctctgttttttgtttttttggtttttttctttacagtgatagtgaacaattacagtccttggaaagactgaattatagcttaatgaatgtacagatacaaatgtctggatgtttatattgccaggggtagaaatgacgagggaaaacatgcaacccccacaattaaaaggcgtttatttcactattctaaggaatatttgaatctcctttcagttgtatcccttaccttgtttactttacacccaagtggcatttcatacttgaaagcttttcagatagatattacagtaccaatctactttgggtaccaggacctccttcccctgtggattccaaaacaatttctgaaaatatgggagaaggatcttcagttatacccacgtatacaaaatagcatatgtctggattaaagatacatctggaaatttatcctacagatattctcacacatgtagaatattcactacagcattatacattcatatgtagaatgcattacattcacatgtagaaggatattcactacagcattgtatcatggtgataaacaaatagcacaaggtaggagcaatctaaatgtccgttggcagggaactggttaaataaatattggtatatctataaaatagaacaatgtgcagaagttaaaaagagtgaggcaactctgtatatggatagtgaaagtcttcaagataatgttgagggggaaaactggatgcagaactacatgtatgatatgctaccatctgtgtagaaaaagaaacaataaccccccccccacacacacacatacatgcttttatgaaaagaatgtctctacaagaatgcacaagtaagatttctctctagagaggatattcaggtgctgaaggaaaagggtagagacttttcaccatatactctttatatctcttgaactttgtgccatagttaaaaacaaatgaagaaataaaattcagattttagaaacctatcttatgggattatcatgaggattaaatgagtcatgtatataatctaatgcattgtctggcatgtagttaagtatataatacttactaaatatgatacttactagccgttgtttgtcccttcccctccagttccataattgctgtttggagggttcacaggatttattttcttcacctaggccaaggattgttaacctgaatggatcaatgaacctttgaaattgcaaattttgtataagcatatgcttattccagactttccagattctagagagaagagggtctgtgactttaatcagatttgctaaggaagggaaggtcccatggccctaaaaagttaaaacacactaacctaagctgttttgctattttatgtttctttccaccagaaaatactctgctgtcagatcgttttctctttacagctaggaagagactctggctgacttttattcctcacaacttttatcttttctaaatatatcatgtctaggcaagtaatttaaactttctaggtctcaacttcttaactgtaaaaagaagtgattgatctggacaaattcaaaggttcccttcatcttgaaaatgttttgattctatctaggtttactctgtatgggctttaaaaattagaaatattgtcataaaccaagaaaaacccttatgctaagaataatctttaggtagagacctaaatcttgactgagggataaaattggaggtttgtatatacaaatataagaacttatgtcaggccgggcatggtggcttatgtctgtaatcccagcacttgggaaggctgaggcgagagaatcacctgaggtcagttcgagactagcctggccaacatggtgaaaccccatctctaccaaaaaaaaaaaaaaaaaaaacccacaaaaattagccaggcgtggtggcacatgcctgtaatcccagctactcaggaggctgagtgaggcaggagaattgcttgaacccgggaagcggaggttgtagtgagctgagatggcatcattgcattccagcctgggcaacaatgcaagactctgtttcaaaaaaaaaaaaaaaaaaaaagcgtatgccaacctgattccatatagaacagccatggtttattttcacattagcaataaagctaccttactaaagagatagggctatgtaagatgccctggtagtcctgttgacatctctgtaaaacctctcccatctcaaggtcttttctctgctttgttttgggaaaaggggagaatagtagaaccagtgagttgtagttctacactaataaaaaatgcctctatcaatattgatcattatctgttacttgattgaagtccagatcatagttcttatttatgaaaaaccaatctgcatactttaactcagatgtacatttagttattcatattattgtacaactcaattactcagaaacatttgtcccaaatttatactgtggtcatttttgcctattgcttcaaaaggctttatagaagatgggattcttgacttacaaggcagttcagggttaatccattcaacaagcatgtgaagataagggcatttcagataaagcatgcagaggtacctggattcaggttttagctctgtgtcttatgagctctgatcttgggtcagtcacttatcctgtccatacttgtttcctcagttgtgaaatggtgataataaaagcacctactgtatagcattataaggattaaatgagataatacatgccaaagcaacatagtatttggaatgtagaaagcattcaataaatgtagtctttttttttttttttggagatggagtctcacttttgtcacatgggctggagtgcaatggcgtggtctcagcttactgcaacctctgcctcccgggttcaagggattctttcacctcagcctctcaagtggctgggactacaggtgcattgtgccaccatacctgactaatttttgtatttttagtagagacagggtttcactatgttggccaggctggtctcgaactcctgaccttgtgatcctcctgcctcggccttccaaagtgctgggattacaggtgtgagccattgcacccagcctccttcattttctttttctttctttctttctttttttttttttttttatcttttagggatggagttttgctctgttactcaggctctcagctcactgcaatctctgtatcccaggttcaagtgcttctcctgcctcagcttcctgagtagctgggattagaggctcccgccatgatgccccgctaatttttgtatatttagtagagacagggtttcaccatgttgaccaggctggtcttgaacttctgacctcaggtgatccaccctcctcggcctcccaaagtgctgggattacaggcgtgagccaccgcgcccggccccggcctaatttcttttttaaaagcaaacaattcatccttaagtattagaaatagcataaattttattttattctagaatattattaaattctaaaatagcagttttaaataattttaaatttatgaaagttgaaaaaagttttgaattttattttaaaacaagtcaaagatatatacttatttttggtgtttccgcataggcataaggaacacttttggattttaaaaataacaacttattggatgatagtgaagttacagagattatagtaggtatacctggagataccagcaggaacatagtagaaataataagccaaaaacacttttatttatactgtaaccaatctccttggaaaactttagaaaacacaaaaatatacaagcatacattccatttattcagcctgatgacgtcatcacacatacagcctctggaaaaccccactctacactcaagagagaatgaaaagtgaaaaagacaaaggacattttagtattatgaaaatgcttttgacctcaaaagcccctgaatcaaagggaaaggtgaaaaggaaatcgccattggcaatggtagaggctatggaagattgggtcttgcaaaatttattagaagacgtttctgaagagaagaccttctgaggcacccctttgcaggtaaaaaaacattcatgtcctctttctccacaaagcttttgttaatcaccagacctcacagtggtctcgcagcacctcttaaagcagtggttctcaaaatgtggtccatggactcccaggagtccctgatactgtttttcaaggtctgtgaggtcagagctgttttcataataatactaaggtgtttgccttttctatggtgttgacattttgcactaatggtatataagcaatgataggtaagtaattaataaccattagttattgtatttgtcattggtgtgtacttgcagataacatctttcttccagtttcacttagaatgtttttgatgaagccattaaaatgattagttttattaaatatcaatcctggagtataattttttttttaatgaactgggaagtacacataaagtacttcggctgcatgctgaaatataatggttgtcttgagggaaagcattcctgattgtttgagttgcaaactgcactaggctcctttttttaatcatgtatctcttttactttacagagagaccatggttattcaggtttgggcatctggcagatattttcttgaaaatgaacgaagtgagcctgtctcaaggaaactgacagtatttgttgtcaatgataaaattcaagctttcaaatggaaattagaattttggaaaacccaaacccgccaccatgagcttgacagcttccagtcaagctgtccccggtgtagacctcgtatttgagctccagactctcactctacctatctatatatatactgtgtccacataaatgtttcatattctaaatttaacatgtccacaatggaattttttatttctcccacaaaactttctctctttcaccctgccccaatttttctcatcttagtaaatcacctccaacccagttgttcaaactagaattgaagtcattatttctttttcctcacctcctacgtccaatccgttagcaagtcttttgagttctgctgttaagataacctcagatctgcttgcttttctccacctttgccattagcctattccaggttaccatcatcttgcacttgatctcctgcatcaggtatctcattggtcttcccttcttgcctgtctctaatccattttccacacagcagcagatgtaaatagaaattatttcatgtcactccattgcttaaaatcctttaataatgcccattatacatagaataaaattcaaattccttagcttataaggcctttcatgtttaggcctttacctcctcattctttttttttttttttttttttttggtgcagagtttctctcttgttgcccaggctggaatgcaatggtgtggtctctcggctcactgcagcctctgcctcccgggttcaagcgattctcctgcctcagccttctgagtagctgggattacagatggctgccaccacacctggctaatttttgtatacttttagtagagatggggtttcaccgtgttggccaggctggtctcgaactcctgaccttaggtgatccacctgcctcggcctcccgaagtgctgggattacaggggtgagccaccatgcccggccattctttacattctttacattctttacaacctcattctccctttcattcactaaattccagccacacaagtaatctttctattccttaaacatgccaagttctttcttacatcaggggttttgcaattactattttctttctttcatatagcaagctttctctcatccctctggtcctagttcaaatgttatcaccttaaaactgcctttcttgattattctatctaaggtagtttcttccttttataccttatttagcctcttggtcatttcctgtataacagcataaatttaattatttcatctatctatttacttaattttttatccgtctcccttattagataaaaataagcaaataattttagatgtgttaagatggaggtgcctataggaatatcatacagtgacgccatctagtaggccactgtctggaacttaagctcagagggagatgttattaatagatacagagttttggaaattacctgtatgttaatagtaaatgaagccatggatacaggtaagaggaagatttgactgaagaggacacagagactagaatagaatcttcaagaattcccacatttgagggaccaaaaagagaagcccaaaggaaactgagaatgaagatattttggagatcaaaggaaatatgagtataatatcagaaaagccaaaggaagagagtctttcaaggaagaaatattaataactgtgtcaaaatcctgagaagtaaagtaagctgagaagtatccaataggcgtagcaataaggacatagtaaccatggcatgaataatttcagtggattggcaagacaagacagaccataatagattgaggactgaatggaaggtgaagagttgtggatatactgtaataagtttagaaagccaaggagtttggcattgaaggcaatcagtccccaagaaggtgagagagaatttgatccagagcactggtggaaggatagattttgatgggaagagaggatcttccattaaaacaggagggagataggagaagatggatgtggggaagtttataggtttgagtattgagaagttggaaaagaaattgtttccatttaatgattttagttttttctgtaaaataagagtagaagtaatatactgagagtaagggatgttatagccagacatttgagaaagtatagaacattatgacagctggtatggagacaagaagaaagggctgagtaaggaaatgtaacaggattactaggttgtattgacctgtgtatctgggttgttttcagcagcagaacagtccaggcgtaggcatgaccatttggtaatggtagtctgcctatgtatggttccttgcaagtcttcactgtggatgacattgagtaagacttgctcttgcaaccgaacatagactctggttaacactacaatgtcagcattgcattaagaagatagattgaacttccttccactttctctgtcactgctagacttggcagaagattttgactacagcatctttaccttgtagagaactgcacttagaagcaaagttgaagtgatttatggacctcacagaagggatttatagctcccgtaggaaataattggctcatgacctttaaaattagaggaaatttgccttggagtcatccagagcgagtgaacacagcagcacagtcagtcctcattattttcagattccatatttgcaaatttgcctagtcagtaaaatttatttgtaaccccaaatgaatacccccgatccttttgggatcatagacatgcatagaatggtgaaaaatttgtgtcacctgacatgcattaagaagcaaaaattgtcctggaatacaaaccttcaagaagacctacagagctgaggtcaaacatgacaatggtctgccttcctgtttcatccctcatactgtaaacacgtgtcctgttcataatctgtttagtgccatatatttttgaatttttgtgctttgttttagtgattgcactgtgtaaaattgtccccaggtgtcatggtaaagtgttgtctagtgttcttaagctcaaaaaggctgtgatgtgtgttactgagaaaatgtgtgttagatcagcttagttcagacatgagttatagtgctgttatctctgggttcaatgataatgtaccaaaatacattaaataagatgtctttaaacagaaatacatataaaacaagattatgtattgacacaaatgctgagaatcacatgcacctaaccgtgtatttttcctaggagcagtggttcactgttggcaaatttagtgttcatggcaactttatagaatgtaactacctcaaataataagaatcaatgtattttatatatttattttggaggaccttaaagtatctcacagacattagctcattcatcaacacaacttccagaaattagctgctagagaatgagttgttatttggaggataagggaaaattcactctgtaggtctcccttaaggtttgtattctaggacaatttttgcttcttaagtagacagtattttacccttggatgtaaaaagatctgcttgctaattatggttatgtttgattgatttgctttggaactaattggaatattccctatttgacttcaatggggaaaggttaaaaggtaaagaaagcattttggaaagcagtcagaactttttggcagaaaagtaccaggtagagagaaataatcatagtggttattatcacaaatgtaaaaaaggtaaggatataaattgctggatacatatttgaatgtgttatgttgaaaatggctactcacatatatattataggaacttttctctccttcaactcggcattcaaacctttgtctagatcctgctaattcttcctttatatgatttctcaaatttgttccttctttttcattaatatagtgataatctggaaatccagactttaaccattttcaaagttgacctcaaagttgctctcatttctttcagccacattttcccttgaatgtaagagttacacagtaataaaccatcttccttaagcatatttttatcacattctgcagacatattactgccctacttagaaactttcagtggctgctagttgtctatttttaaattactataaaccactgtctcttcatgttcctcaattctcctacagcctttccaccctatcccctgtaattgatgtcatctcataattcattgtgtgtgtaggggaacctctagatgttaattccttcatcttataaccaaatctataaagctgcctgtgtctattccttttttcccttccattacaaaggaaagaagtattagaacataggcatctttgatgaggggcattattttgtctaccacacatttctttttttcttctcaatataagagcaatgtatcctcattccagaaaaattagaaaacagaccagcaatttaggaactgtgtaggccctgttgatctcctaatggaaacagagatccttagttcatgttgattaagaagggagggtctctgatttacttaaggccttgaagatactccaaaagtttgtcaaaagtcacagagaagaaaagtgtcaccttccacataaaatccatggggaaaaggagtactgtaagactcttggcaaggtatttagtttctctaggtcttggcttctttatccttaaaataaggaattgaattaactgatttttaaaattattgtcttttaatatataaaggctggtacctacattctactaaaaatcaaaagagatgaatagataacaaacataggtttgctagttttttaatcaaatcaacgtatagtgttatttcgggattcagtcagttacattttcacagtcatgaaagacaaggaaagactgagaagctatcacggattggaggataccaaggaggacaaccaaaagcgatgtgggatcctggatgggatactggaactgaaaaggggtattagtggaaaaactggtgaaatccaactaaagcctgcagtttagttaatagttaatagtattattaggtaatagtattgcaccaatgtgaatttcttagttttgataattgctgtgattttacaagaagttaaccttagaggatgctaggtgaagtacatatggaaactctgtactatttttgcaagttgtttctaagtctaaaattatttcaaaagaaaatgttttttattaataagagtgggaaagcaagccacagagggagagaagttgtttgcaagatttataactgcaaagaactcaaaatcagaatgtataaataactcatacaaatcagtaaagactgacaacccaatagaaaaacaggcaaaagacttgaaagactcttcacataagatgatgtccaaatagccaataagcatataaaaatgtgcttggtgggccgggcgcagtggctcacgcctgtaatcccaacactttgggacgccgaggtgggtggatcacgaggtcaggagatcgagaccatgctggctaacacgatgaaaccgcatctctactaaaaatacaaaaaattagctgggcgtggtggcgggcgcctgtagtcccagctacttgggaggctgaggcaggagaatagcgtgaatccaggaggtggagcttgcagtgagctgagatcaggccactgcactccagcctgggtgacagggcgagactccatctcaaaaaaaaaaaaaaagaaagtggggcctcaaatagatatttgcacatcactgttgataccagcactgttcacagtagccaaaagctggaaacaacacaaatgcctatcgacagatgaatggataaacaaaatgtggcatagacataaaatggaatattattcagctttaaaaaagaaaggccaggggcggtggctcacccctgtaatcccagcactttgggaggccgaggtgggcggatcacgaggtcaggagattgagaccatcctggctaacacgatgaaaccccgtctctactaaacatacaaaaattagccgggcgtggtggcgggcgcctgtagtcccagctactcgggaggctgaggcaggagaatggcgtgaacccgggaggcggggcttcctgtgagcagagatcgcgccactgcactccagcctgggagacagagcgagactccgtctcacacacacacaaaaaaaaaaacaaaaaggaatgaaattctgccatatgctacaatatggaggatccttgagaacattatgctaagtgaaatgtcagtcacaaaaggacaaatagattgtatgattccacctatatgagttacccaatgtagtcaaattcagagacagaaagcagagccttggttaccaggggctggagggaagggagaatgaggaattgttgtttaatgggtatagagttgcagtttgagataatgaaaaagttttggagatggatggtggtgatggttgcacaatgtgaatgtacttaatgccactgaactgtatacttaaaaatggttaaagtggtaactcttatgtacatttaccacaatttttttttaagtggttgtgttggtaatggtagtggtggtggcaagatatagatgaaaaccacagtgtgacaccattatctagaaaggctaaaatgacagaggccaaggatctgaagcaactggaatactgagatcttgctggtaggaatataaactagaacaagtatttttggaaaattgtttgacattatctagctgaacatatgcatactccataacctagcagttcccctcctagatatatatccgtagaaatattttcatatgggtaccgaaagacatacaagaatgttcacagcaacattatttttttatagtccccaagctgaaaacaaccaaaaagcccatcaacagaaaaagtggattcagtaaattgtggctgttcatgcaatgggatactttcccacaatataaataaaacttctagtaaatgcaacaaacttggacaattcttaaaaatacattaaaaagaaaaaaagacaccttaaatattttatgatgtttatatcaggttcaaaaataggcagaactgatcagtggtgacaagagtcaggacagagattacctttggggaggagtgagggtaacaactgataggcgacctatgagaaggctctagggtactgggaatgttctagtttcttatctgtgtagtggttgcataggtgtgttaacttttgaaattttatcaagctgtagctttgttatttgtgtacttttgtaactaagttatgcttctataaaaagtttattttaaaaaagaatatagcgagaagcacacattctacattcatttaatggcattatgtttcattatttaacccccaacctccagctcagtgataaaactgagggccctaaatgcaaattccttcccactcttattcttgttgttttgaagtttaagaacaagttttcaagtttaagcttgacttttctttgagaacagctttagctagaggtgctaactatgcagcaaactgaaccctgacctaagtggagctctaattagccgggtcagggaaattgagaatttaagtccatactccactcctggattctacaggtcttagggagtagagaaggtagcttagtgactgctttagaatactgtaatctttgtattacttaattgtttatttgagaaacactggattagtcagtggcaaggaggtacatttagtttatactaagcataattttgttatagtgatgtttctatttataatagttttgttaatttttactcataccctgttctcttttccttccttttactcttcagctacctgttctatatttaattcattttaggctttgccctgagctagctagctatttttttttaattttaatttttttttttttgagacggagttttgctcttgttgcccaggctggagtgcaatggcatgatcttggctcaccgcaacctctgcctcctgggttcaagtgattctcctgcctcagccttcccaagtagctgggattacaggcatgtaccaccacgctcggctaattttgtatttttagtagagacggagtttcttcattttggtcaggctggtctcgaactcccgacctcaggtgatctgcctgcctcagcctcccaaggtgctgggattacaggcgtgagccaccacgcccggccactattctttaaatcatatattcatctagcacatattcatgggttgtttactatgtgctgggcacttggaatacaaaaataggacatataacttctgttctcagattgcttgcagtaccagtgtggaaagagacaaatgatcaattatagtatcaatgctgacatgcactgtgatagagatcagtctgggggattactcagtaattcgtgtaattgattcttaacctagaccaggaactggaaatgtctactgaaggaaattacagctaatctataaattttgaaagacgtgtgtgtgtgtgtatgtgtgtgcatgcatatgcctatgtgtgctttcattcagagtgggaaggtaagggaatgtagagcaccaaggctccagagataggcagagaccaagtcatgaaaggtcttatatgtcatcatgctaaggagtttcaattttattttgaggatagtgaggagtaactggggtgttataaacaaggaagtgatatggcatgtataaatgaatttaatgaattgaagtaggctgttacatgaatggaattatctaggtaaacttttacttttcaaagtgttgtcccagccatattgtcatcatctcagagctattcaaaatgtagaattttgggacctattccagactttctaaatcagaatgggcattttattttaacaagatcttcacatgatttatatgcacattcaagtttgaaaagcaccgatttagacagataatgatgatggtcaggctttatacagctggtgtgaggaagataggacagattgcaagagatattacggagtacatgttcttccctctatttggaatactcttctcaattcccctccaacacacaccaggtaactccccgcttatcctttacctttctgcttaaatggagcttctctcttgccacggccccaatacacataattggtgcccttgccatatactcccatgtacttatattatcatttctcacacttttatatacttatttaattgcctctctccttgtactgtaagcaccacgaagataaagatcatttttctgtggtacttggcacatggtaggcacccagtaaatatttgtgatttgattaaatgaatgaattcttcatgtataagaagagaaaatggatttgggtatgctagagagaaggatgtacatgctgtaattattaacaataatagttattttatgtatgtgtgtgtgtttatttttggacacccagtcttgttctatctcccagacagagtgcagtggcatgatcatagatcattgtaacttcaaactcttgggctctatcctcccatctcagcctccccagtagccaggactgtaggcgcacaccactatgtctggctaattttttttttttttaagagatggggttttgctatgttgctcaggctgaataatagtaaattttaaatagcactaataagttccaggtgctaagtgctttgttcatattaatttatttgattatcccagcaatcctataggatagatattcttaatagccctattttacagatgagaaaactgaggcacaaaaaggataagtaatttgcctaaggttatgctgttggtaagaagcgagattcaaaccaggcagttgagtactactctgctctatctagttttggacaaaatagcttcctggtgcttagtgttttatatgtattagttatttaatctttataaaaccaatgtgtagaagatactgttatcctgatttacagacaaagaaacaaaggttcaaaaaggttgtgtagcctgaggatacacagctagtaagtgatgaaactggccttcaaacccaagtctattcaactttaaaagcctatagtctttacctgtaatgatgatgcttccatgttgagtccaaaaaatacctgtgaggtatgaattttagattactgaggaactgataagtaagatacctaacatcatttaggttgtgagatagggagaagggctcaacaatgccggtgtctgtgatagcactggcattttgagtttgaaggagtaaaggagatttaaggtccagcaattccagccagtctcatacttgaccacattgagctttgaactcaggtggttaggaactttagcctccataataagctgaaacttaggtgactaaggaatagttattggttttcttgtttttttttttttttttttttttttttatggtctcagagaatctagatggattggaaatagtgttagaactggaaggaaccagttctaaccttccacagttcactcttccttacctccctctcattttatgataaggagattgaagaagggtaattaggtgatttgccaaagtccaataaaacaaagccaggaaaagaagacagggtcacattcttgtattccttgccctgtgccttatctctaggttccagattcatcaccttttgattaaaactgttctgccattatagtaacatcttcactgcctgggggtttttttagctttgagccctgaaaagagtaactttttgtcccttcccctttggccctaagcacatactcactgacttcagatcatccggcaggccatatgccctcatggatgacgatagtatcgagtcaatacttgtgggaatacaactggcacagaggattttgagctgtttttggagttaagattcttctaagctattcagatacttggtcaatttttgtacaacagaaagccgcaggagccgatacagtttgcataacttttttttgaagttgccaactcctcacctacatgttaagggtaatataatcatatgcagtggtctcactcctgccctggctataggtgtatcttctaaggcacattatggtaaagtggaattatattggaaacgaatttataactagtacttatacctataccttatgccttacacagtctttgtcagttaataggccttcagttctcaaatgtaatagctactattttatttccatttcagaattgttgcagaaagacgtagtgaggttgcagtgttcaaatagtctattttagttaaaacctacagtaaggaaacaaaaaaaagtcataactaaaaacaacacttagtttagcctgccaaagtgatatattttacttgtgtttattcttttatttatttatttgagatggagtctcactgtgttgcccaggctgctcactgcaacctctgcctcccaggttcaagcagttctccctgcctcagcctcctgagtagctgagattacaggcgcccgccaccacgcccagctaatttttgtacttttagtagagacagggtttcaccatgttggccaggctggtatcaaactcctggccttaagtgatccacccgcctcggcctcccaaagtgctgggattacaggcatgagctgtcatgcctggcctattttatttttaatcttgtttctctaaaagtcattttcttctgtggtttaacactatcatgaaggttgtcatcttctatttatttaataaatcattacatagagaaaataggctgggcacggtggctcatgtctgtaatcccagcactttgggaggccaaggtgggaggatcacttgaggtgaactcctgggagttcaagacaagcctgagcaacacagtgagaccgctatctctacaaaaaattcaaaaatgtgccaggtgtggtggtgcacacctgtagtctcagctactcaggaggttgaggtggcaggatcacttgagcctgggagttcaagcaatgatcacatcactgcacctcagcctggatgacatagtgagaccctcttaggttagaatagaatagaatagaatattaatttttttcttttaccttaaaaacattttttttaactttttattattttttaatttttgagacggagtctcactctgtcacccaggctggagtgcagtggcgcgatctcggctcactgcaacctcttccaagttcaagcaattctcctgcctcagcctcctgagttgctgggattttaggcacgggccactgcacctggctaagttttgcatttttagtagagacggggtttcaccacattcaccaggctggtctcgatctcctgacttcaggtgatctgcccacctcggcctcccaaagtgctgggattacaggcgtgagccactgcgcccagcttcttttaccttttcttttttaaaattattattgttaccacactagtctacactatcaatataatctagtaattttcttatcactgaaatattctaacggttgggcttcactctagccataaaatagacttttggccttaatttgttcctaaaagtttcattataatgcagatcaaaatggattacaatgggtgcagatcgagcaatggaaaatggattatatattcctgcagagataatataattaaggactaaaaccctactaaggacttctcgtcaaataagtcatataggtgtagtcagtaatataactaagcctcataaatataaaacagtgttccaaattctataaaatggacataaacatattgaatacattgagtatgcaagttgcccccaaagtataattaagaatacgtacagcatacataaattttaaatttggtaatttcttaagcacctactatatcgcaggtattgtaggcaaatcaaagtaggctaagcccctgaagagcctggagactaacaaggggtagcacacatacataggaactataatttgaggaatggtgagaatagtgatatagccaaagaacaatattagatgaaggggagattccttttttaaggtcaggtttcatggtagaactatcattcctttaaatatttgaaaaagtgaagataatggaagtgaaggcagaaacgaatgcattttgatttgagaaaatgacatgagcaaaggcattgaggtaggaaagaacacagcatgataataacataattaagagctaccattaattaactccttagagtatgtacccttttaaaatccttgcatcagtcctgttaggtaggtagctcttattatttccaccatacaaattggaaattggagttatatagagaggtcaagtaagtggcagaggcaggattctaacctaactctgtctgattccaaaaccagtgttcatggtcaccatactgtgtagtctttacattcaagaagtagcagataatacagtttacctggaggatagagtatatatatatatatatgggtatgaagtggattgtcttctgggaaaggatttgtagagggttaagaggcagtgaaaatgaacagaaagggatagatgaaaggtttggtggaggagggcacagaaataatatccaagtgattgttctggggactgtgggaaaagggggaaatcaaaggtgcctgaggtttcatatatggttgcctgaggacagtggcatcacaaacacaaaaagtgaggagaagaaagtgttgtttggaggggggcgggaaaggaaagacagcaataatgttgattgtagatgtgttgcatttaaagcacagatgaaatacaccattggcaatttaggtaacagatgtgacttctcattttaagaagtcctctgggtttaaaggaagacagaggacaataattagaggttgctaggagctaagactttatcagagttgacactctgacttcagtgggccttattttccctgcatctcatcaccctgtgtcctgacatcactcaagtcgcctcaactccatagctcctctatgaccacagcttcctttacttctacctctgctgttcttatttcgcctgctctccaccctccctgtgatcccttgatacgtctgaatgcacctggttcaacagtccctgttttcacctgcctttctctccagtcaaacctctggccattcatttgaattctgccctctctggcatcttacagtacctcttccatagatattaccttcctctcctccattccaaatccaaaggaccattctcttaagtaatgaaggccttacagggtgatgaactgtgaaccccaaacatctgagacaggtctcggttaatttagaaagtattttgccaaggttggccaggcgtgctggctcatgcctgtagtcccagcactttgggaggctgaggcaggtggatcacctgaggtcaggagtttgagaccagcctcaacatggcgaaaccctgtctactaaaaatacaaagttagccgggcgtggtggtgcatgcctgtaatcccagctactcgggaggctgaggcaggagaattgcttgaacctgggaggcagaggttgcggtgagccgagatcacgccattgcactccagcctgggcaacaagagcaaaactctgtctcaaaaaaaaaaaaaaaagtttatagaaagtttattttgccaagattgaggatgtgcactcatgacacagcctcaggaggtcctgatgacatgtgcccaaggtggtcagaacacagtttggttttatacattttaaggggacatgagacatcaatcaacatatgtatgatgaacactggttcagtttggaaaggcgagacatctggaagcagggagggggcttccaggtcatgggtagataagagacaaatggttgcattcttttgagtttttgattggcctcttcaaagtaggcaatcagatgtgcatttatctcagtgagcagaggggtgattttgaatagaatcggaggcaggtttgccctaagcagttccagcttgacttttccctttggcttagtgattttgggggcccaagatgttttcctttcacagagcctataatcataattataatattgtcactgttagctgtagagaaactatcctcttcaatgggaattaacactgtaaagagtcctggtccttaaagggaccaaagcaggcatatcttgttaggcttcctttgtgcctgaaacctgtggtactcttattggataatatactctaggaatgaactaagcaggtgagataggctagcttaccttttttctagttatgtcttatttccaaaattctgaagtgtgcagcaaggagggagttggtatggagagataaagcagaaacaacttcggaggtcctttaaggtgatagtgtacagggctactgcactggcatcctgtttcttcctgaaaccagatctgtgtgtaaaatccagcattggttagggactttgaggcagcactagtcttggttggaaaccctggctgtcctctaaacctacactgtggtggcttctgactagcctcagtgaagtcactttgcaatcagcacctgtgtgtctgtagctgcgggccctgaggccttcgtgtatgtagcacagggagccagcagagggagctgtcgtcccagaactttcttagagctgctaagaaattctgattttgaaaaagatcttcctaggctccatccgaacctcccatgcaataagactctaacttgagatatgcgagagtttggtgccagacccctggtgtgagcagatggggagcttctgcatagctgtttaaacttgaaagccctaggagctcttgatttcaaggaaacgcctgtttactgatccaaatcaagcaactcttgagaaatgggagtgccttcctgacctcagtctttattgatcttggtatccgcacctccagtgacgtgtcctgaagggtgggagagaattcacaagtgcctcacacacagggaaagaaggaagtccaactattgctgcagaaagtccccactggggaggtgcgggtagagtgtttgggtagcattaaaacagtgagtgccctgtgagaagcacagtgcctgggtgcagcactttgcatcagctctgattttgaaatcagacacagaaggctttgaagccggccagtaaggggttgtcaggcagttgactaatgctcttgatttgaatcggaggctgctgtgaaaagggatgcagcttctgctagccactgtgaacttctgaatctcactagggttgggtctgctttggggcactcagataaccccagtatttccaaaccagctttcccttttgcttcaggacatatcttacccaagcctgcactatggagaagtgggacggtaatgagggcacctcagcttttcacatgcctgagtggatggtgagttcactggtcgttttgtttctccttctgtttcttgataatgagaggcaaccatttctgacgggtgacaaggatcacctctgagaagctcctaccaagatccgtggttggaaaaacagttattactctacgttctgattagttcctaggtactaggtcaccactgtttcttaattatccacgaagctgggaaaggtgtgagagttgcctggccagggcttgttgcctggtcatctctggtgggcaggggctttcctccggctgctggtgtgatgtatgggttgtgtttcctgtgactgttttgcacttctgttttcaacctgatgcttcatttgtttctctgggggtaaagaaaaagaacaatgaggagaaaaaacaaaaacagaacttacagaaatggtgctctctgaagtctgcaaagattgcaaacatttctcccctccctgcccgtatttttcccttcagtcacaacatttccctatttcccccccagctatcctttatatatatatttctctatggcaggaactgcagctctcttggtacagttcttcagaataccatgtttgcctgatcagtagttttactaaaatgataataaggacttatttgttgataagaactagcatataaacctattatattggatcgaatttcaacttttaaagacaataaccatccttatgtttctaaatagtttcttctagatttagcctgatttcttacagcccacacaggtttatgtttacagatttgtgtttccccactatggaaaactagttagactctctaaaacatatttcaagttctttttagtgtttatagaattatggatttgaagaaataactattgataatgagatagaatatatagtaggcctaacaaaggccccctgaggaacttacatttcaactcattgttacaactattttttattgttttgggggaggttattgctgttcttcttaatgtcgtttcagaacattgtgttcaggttttttttttttttttttttgaaatggagtctggctctgttgtccaggctggagtgcagtggcgtgatctcagctcactgcaacctccgcttcctgggttcaagtgattctcctgtctcagcctcccaagtagctgggattacaggtgtgcaccaccataccgggtaatttttgtatttttggtggagatggggtttcaccatgttggccaggctggtcttgaactcctgaccgtaggtgatccacccaactcggcctcccacagtgctgggattacaggtgtgagccaccacgctcagtcttgtgttcaattttaaaacattttgtggaaagaaaacctatccatctacaagcttattccaagtaacatagtgttttagaattaatggaaggatttatgtaatacttctgattgggttgagtttttttgaatttcttgctactcactaataacaagaagagggaaaaagaaatttggttttcttaagggaagggccacgttaaggtatcaaactttggtatttctataaaggaatattacagaagaattctactgaacattagtgtgccaactcagaatcaatcaaagttttataataattcttatttctgtcatagtcctcaccgtcttacaagcttagcacatcccctcaaagttcagtagtggctcctgctgaactttcacccatttaccttctttctagttaatgtgaatgggaagactgccctaaaggagttggtgtgaccactgcataagggatatgatctagggcttcccagcttttagaaaacactctttatttaataaaacacagctctttagtgttgtgtcttggttggtaaaaaataaataaaaaaatttgcagccgggtgcggtggctcacgcctgtaatcccagcactttgggggaggccagggcgggcagatcacgaggtcaggagatcaagatcatcctggctaacacagtgaaacccggtctctactaaaaatacaaaaaattagccgggcgtggtggcgggcgcctatagtcccagctactctggaggctgaggcaggagaatagcatgaacccgggaggcagagcttacagtgagctgagatcgcgccactgcactccagcctgggcgacagggtgagactccgtctcaaaacaaacaaacaaaataataatttagaaaagcacagctctgctctgttctgtttttaataaggtattactctcacttaggaatttctcagccattctctcttaaatagcaggaaaatacctttgctcagtattttgaacagcaataaaaaggaatagggaggagctagtcttcaataacacgattgtctcatttgctagcttttctttgccaaagacttttgaggctttctttcagataccacgtaagtcattgactcctgacttggtctgaaagtacttcattaggttgctactgatagccacttagccaagaaagctaacctctgagcaccctctagtgtattgccgatggatttccagaccttacttgtaaaatgttaaagtgtcttttaatccccaagaaaaaaaccgttgctccagctcccatgttgggccaaagtttcaatttaaagttttaacgagtgtcttactcatgttcccatttacatattagtgtaatgaaatttccactgaaactatccctgccaccaaaggaaatatgagaagtctctcaaatcttctttcaggagaaaaatttagcagagaaggtatattacaacatctcccttttgttaaaaatcaccagcaaaaagggacttcatatccctcagagaataggactcacaccacatataacagctgacagtactcacatctctgatttccagcagggaaataagccgggatgaagcctgaagaaccccaatctcaagaactgacgaggtagactttcaaggttacgttccatcaatcactggaaaacttctcctggagcctctgctcctcagctgttttcatgtgaaggattttcttagccctgttcagacagctttactgctgaaaggttggggaacacttccttttaaagactgtctttattaatgtgttttacttcccctgagagatctttagtcccttctggtagtaacctcgactgacatgcatggagatcagcaataactttttctgtgtttcaacattttaatatttcctcctcctcccactccagctctctgtacttttccataggaaatctggttgattgactttcatgagtatccagccagcttgatgcccgatattcttttggcaagaagtaatccttttcataggtaaagagttagttcaagccgctcatttggcttggaagagagaggtgttttgaggaatatctgaaccatatctacttggaagtagagacaaaaatctccaaagtgtctgataaatggtggtagaggtagcttgactatcactctaggtcaggattggtgcttaaaacagaaagccatttgaaaaactgatgaaaactatgggctctctccccaggatattaaaaacacaaaattttgcatactgttgtagggggttctagacatccatggaatataggttaagaacacttaatttgaaagaatagaaatattaatattttagacttgcatatcaatatgtagttttcaaaaccctctcacatcttattatctcagcatacattttaaataggcaaagtagatatgattatccctattttagaaatgatgacagaccttaggaagtagagacacagatacatcctttgtagtattactttatgtacttgaaaaggaattaattggtttctcttggccttgatcctctttaggataaatagatcttctgtcctccccatgagtcctgtttttcttaatatattacctgtctcttcttaagagccttaagttacggaaagcagaattagacccagttttctttagaccctgttttgggtgtaaagaaagatcacctcagctgggcgtggtgcctcatgcctgtaatcccagcactttgggaggccaaggtggatggatcacctgaggtcaggagttcgagaccagcctgcccaacatggcgaaaccccatctctactaaaaagtacaaaaaaaaataagccaggcatggttggtgtgctcctgtaatcgcagctactcaggaggctgaggcaagagaatcacttgaactctgagaggtggaggttgcagtgagccgagatggcaccattgcaccccagcctgggagacaagagcaaaacaccatccccccaaaaaaaagaaagaaaagaaaggatcacctcattgtattctctgacctttcaaataacctttacttttctgcctgtgaacgtgcctccatggttatagccatgataggatagaatggttggttaagtagagtcaagagaatcagggctgctttactcacgcttggagaaagtgttagagcagtggtttccaaagtgtggtcttcagactggtagcatcagcgtctcccggggagttactcaaaacacaaaatcttcaaccagagaattggaagctgaaaaaaatttttttttttaaattacaaaatacaaaatcttgggccctctccagacctaataattcaaaaactctggtggttaagatccagcaatgtgctttaataagctctccaggtgattttgatgcagctaaaatttgaaagttactgtgttctataaaaacttattggctgtgtgcggcggctcacgcctgtaatcccagcactttgggaggccgaggtgggcggatcacgaggtcaggagatcgagaccagcctggctaacacgaagtaagtgatggaactttttaagtttttttttagtagaaaccctgtctctactaaaaaaaacaaaacaaaacaaaaaagcaaaaaaactagccaggcgtggtggcatgcgcctgtagtcccagctactcgggagactgaggcaggagaatcacttgaccccgggaggtggaggttgcagtgagccgagatcgcgccactgcactccagcctgggtgacagaccaagactcagtctcaaaaaaaaaaaccaaaacaaacaaacagacaaaacttgttaagtggtaaggcttttcctgtctcctaaaatgtcttctggttctatttggtatagatatgccagtccttctggctcaagttatctgacttaagtcattggaccaaggagctcctttttacctgagtgagggaaaggggaaccagcttagtacatgcggactggggtgaacattcttgttaggaggagcaaaagttgagagattcatcaagcaagcaaatgatctgtctcactttgtgaaattatgagtaagagatcagaattgctgtgggtgatggtgaatattcatatttgagttcaattaatttctgtttccatttctggtagtgacattgggcaaagttgccttaaagagctgttagagttctaattcttatataattaggtgttttagaattgtgacttgatcagggccccaagattatccgggatgatgtcatttctaagatgtaatctgatacgaaaatgaatttaaagagtaattttaaattaaataaatttaaagataaaaggaatgatttgaggctagtacacctaggactaggacctttggtcttctgattaatattatgaggcatggtatagtagatggagctttggctctagcataaacacaggctcaaattccagtcccatcacttacttgctgtgagaccttggacaaatcatttgttctcttagagttaaactttcctgctttgtcaagtgagaataatactgcctaattcttaagattcttgtacaaattaatagaagtaacatatacacagaactgtgaaaataggcacttaccaaacttttctcttccagagatgtcaataagcagtatgcaatgtgaccttctctctctaaataaagattatccttaaaaaaaaaaaaaaatctgccggctgggtacagtggctcatgcctgtaatcctagcactttgggaggccgaggcaggtggatcacttgaggtctggagttcaagaccagctgaccaaaatggtgaaaccccatgtttactaaaaatacaaaaaattagcccgcgtggtggcacatgcctgtaatcccagctacttgggagtctgaggtaggacaatcacttgaacccggagggtggaggttgcagtgagccgagatcgcatcattgcactccagcctgggcaaaaagagcaaaactccatctcaaaaaaaaaaaaaaaaaatctgccattttatgtcctttcttgtgctcaacaagcagtcttttttttttttttaattaaggaagaattgacatcactttccccccaatctctgtagcagacagttgagtgtagctttcttcctcactatgtctctttcagaaatcagcaaataaataatgtgattctttgcccttttgcttgaatatttggcacgtagtaagattgttgtgattcgggggactctgaggagataagaaacttccctttgtagtcgtcccttccatgaacacacattttgtgaaaaaagcaaactgggtcactctgtgccaaatcagcaacaatcttgagctgggactagaaaccaaatgtcaaaacctgtataaaagatgcacaattcagaggaaagcagtgaactgagaaaattgatttccttggtgacagagctgaaatcagtgtccccagtctggctaatccaaggacacagagtgtagggtagggcctgcctgagtacttggcaccattaatttttttttcttactcctttaatgaagtctctcattgtttaagtggctctgtggttaatttttttctaatgagactaggttaactaaaatcatctgacatggaaaaggaggaggtaaggttgaaaaggaacctaattagcaagttaattatagcgagcaaaaaagtgcagtggttatataaataagctattgttatgcgcatgcaagttgggccttgtcaagggacttgcaaggtttagaggtcagaggatccatgtaattaggtgtttaggaaaaaaacaagtaaaagcaaaacagccactagaattaggaatggctgttgagccactaacagaaatgccttattaaattggggctgtactgctgaaggggttgttggagctgcttcagggattccaaggaagagtagtcccccactccccagcccaaaaagctggctggaaccagagccaacagaattgctgatgaggaaagtttaaaggcctgatcacaagggtccctggaccacagaggtggcagtggggctggtaatgtcactatgctgggcagcaagaagaaatacattgttaatggcaactctgggattaaggcccaggtgaggctaagctcttatttaccagtcttgccgctgctatagccattattgtaaaaggccgactgcttatactctttttcccctcctttcctgctttcatccctccctctggcataaggtgagctacccctcttttaacagtctctttccctcccttgccttaatgcctgttggaattaggcagttctctctcaaatggaaaaggaggattaccttaaaagaccctggttccagacaaggtaggaaagttaggggtagaatctactaaggtaccacaattggggtgggcagattacaaaaccaatccattacaaaatggactgtatattggtgtttaattattaagaggaggtaaacaccagggagccacttaactcatgttctggtcgtcagagaaagatactcgtttcttgcggaaaattgcataacttatatttaagtggttaatctcactctaatatttttctgtcttaaagaaacttgaattcggtgtctaaccagtaagcaaggttttagaaccctatgttctaagtggagaaagccttgtacaacctagtcttctttagtattaaaagatagcatgaacttgtcccaggaaggagggattgctgtaaatagaaaacactatagagaagacagctcagctcagataaactggtttgagatgataatgcagctagatagctatatggtttattcaccttgagcctacaatctagagtataagagtgactggccccctctagtggtgtgtgtacatggtgtgtgtgcatatgcacccacatgtacatgtacgcaggtgtgtggttgtgttggggttgtgttgagcatctgaaacacggtttatctattcttctttaaaggggacactggaaaagttccattattattccttttcctggatgggcttctaaaaaagaataaagacatgtgactgttttgaacaaggttggtgaaacggaagccagagtttgcatcctgactgctgtccacctccccagctttccaccttccctcttcttcccagctctttttgcccttaaaaatcattttaactttagacttggtttatgtttgccatatttagtgagtattcaaacaagtatagacagtgaagatagaataggctacttcagatatattgattcagcacttgattgagtgcctaggatttgtgcctgcagatataagggtgaataagaatcacagcttctccctttatgagcctatagtttatagagaataccggtaagtagacagatagttacattcattgtggtaagtgctgtgctaggagaaatgcaatacatgaaagttcatgtacgtcctatgggagtacatagaaagggcactttatctttttggaataaattgctagttgagcaaaataatcatctttgtcattttttttagttcatgaagaacttcttatccgatgagttttcctattgctgaaaacaatttgcaagccctaaagcactctgtaggctttatttgttgttatagctatgaaaatgctatgaatccccctaaaaggcaatgtgaagctatttcaatttggcattggtcccttgtcgcaatactcaagtgactcattagttacctctaactgcaggaagtggagccgtcagttcctgctttcattctggtgtactgtatgttctgcccatcaaggaaccatctttttatcattaaaggtagagtcacttgtcagacctttgatcattttcattagaccttcctctatgccaccttggatccagaataggcaattatacaaacagagaaaacaaaaaagttattagttcaataaattgtatgagctttttttccccaaacaagtatagcttacaagtgacctttgatttgtagagtattataaagtatcagctggaacctccaacaataggagaaagataaaattgtaagaaaatcattatcaaataatcatccaaaatgcaatgtccagagtatgatatgaggcttatacatattcattcaattaatctgctccttctacatctattatagttaatgatcaatcttactgcttttaggtattttataatatcaaatatttaaaaataaattaatatttacttactagccaggcgtggtggctcacgcctgtaatcccagcactttgggaggccaaggcaggtggatcacaaggtcaagagattgagaccgtcctggccaacatggtgaaaccccgtctctactaaaaatacaaaaattagctgggcatggtggcacacacctgtactcccagctacttgggaggctgaggcaggagaattgcttgaacccaggaggtggaggttgcagtgagccgagatcaagccactgcactccagcctggctacagagtgagactccatctaaaaaaaaaaaaataaatttacttactagtactggaaagctaactaatatattttaaaaagctttaacaaattagagtggctacctgcaagagttacgagagcattgaaccgtaggggttgggtagggagtagatttattgaatttcctgctatgtttcaatttacacacattgtctcattgaaccctctctaaaacctgtgaggtaagtacttttatctctgttgtatttatggaaaaatgagactcactaaagcatcttgagcaacattacacagctaatgagtggcatagccagaatttaaatgcaatttcagaatgttcattcttaatgaaaaggctttttaaaaattattaaatcattaccatttcctgagattcttgaaacctgaatgcaagtgattttgccttcctgtaccttgcaattttctcatctagatatgtggagcttacaaatatgataatctcaaatattctttcttgtaccttgcaattttctcatctagatatatggagcttacaaatatgataatctgaaatattctttccagttttacttttcagtgaaactgtataaaatatttctgaatatgactcaattttctaaaaatttaaccagaatatcccattctctatttgtggggagtggggtgtcacaattttattgtaaaaagcatatagtcaaagagtagccaggcacactggctcatgcctataatcccagcactttgggaggccaaggtgggtgaatcacttgaggtcaggagttcgagaccagcctggccaacatggtgaaatgctgtctctactaaaaatataaaaattagcaggtcattgtggtgtgtgcctgtaatcccagctaccaggaggctgaggcatgagaatcacttgaacccagaaggtggaggttgcagtgagccgagatcgtgccaccgcactgcagcctgggtgacagagtaaaagtccatctcaaaaaaaaaaaaaaaaagtgtatcaaagatttaaatttgattagaaacatagtaggtaaagaatgagacattgccagacacagtgacacatgcttgtagtcccagctgtgtgagaggattgcttgaacccaggagttcaaggccagcctgggcaatatggaaagaccccatctctatttaaaaaaaaaaagaagaatgaaaaagtattcttatcttcaaagggtcttaatatcccaaacataggttgatacaatcagatcaactgttagggaaggtgaaagcctgtaatacaagccttgaattgctgtctcaaaatggaggttctttttctttatataactaggtttctttttcttagcagatccagtttgctgaccagaagcaagaattcaacaaacgtcccaccaaaattggacgtcgctctttgtctcgttccatttctcagtcatctactgacagctacagctcaggtgagtactgaactgctgtggacccagctgttgaggctaataagtacgatctcaatgggccctcctgtctatccaaggctaattaagcatgaccaagactgtgctttgaataaatacttcgagtcaaaatttagactaaaatgctgggtggaatatttggatttctcttggcaattcagagtggagcttaatagaggcctcctcttccaatagagtcagaagagggtgattaaggaaattgaattctttaatctactcagaagggtgggaatatgtcattgatgatctttccggaacagtatgtgtatatacttgtggtcttttttttttttcatcctttgaaaataaaaaagaaattcttcatccctccatctggtacttgcaaattaacagggaaacctcaattgccccaagaagtaatgacacactgtagctagttcaagcaagtgagccctttgccttctctcctaagctgtgacattggacttcttgttattcctcccatcctttgcactggcattaactcagatacatgtgccctgggactgagttatcatttaatgccaggtgagctgttactgtgtaggaccccttgaaggcatcggctagtatgctaaacgctgcctagtatgagtcggatttaatatggagttagtttattttgctcttgtgttgggatgtgatagggagctgagtgcttgccctagttacctcttcacattataaatagtaatattcattagaaaatgtttattatgacctgaaattttatttgttcttcgtacaaataggaaagtaatatttgttatataaagttgaaaaacagttgtttgggaagctgtagcttttaggctgggtagattatttatatactttttacatttgtctttttactttccccccacagtaacagtgaatgatgtaaagcatatgatatcacttcctatggatttttatctaaagatacagaatcttgtactaccttttttgtggggtagcacaagatttgagacagggtctcactctgtcacccaggcaggagtgcaagtggcatggtcatagctcactgcagccttgacctcacggactcaagtgatcctcccacctcagtctcctgagtagctgagaccacaggcacccaccaccatgcctgcctaaatttaaaattatttgtagagatggaatctcaccatgttgcccaggctggtcttgaacttctgagctcaaatgattctcctcagcctaccaaagttctgggattacaggcgtgagccactgcgccaggccaggaaacctatcttattctgctgaaataagcagtgttgaaaattcacaaactggttaatgtaactctggaaaccacaataattgtgaaaaatgtgaattgtaaaatagtttgtaacatttcaagctgtgggtttgtgcatgttatctaaagattgatactaaataataataatatcaaattttaactccagctcagtctctcccctacacactagatatacatatccaactatattcctgcagaggaaaccaatacctgccttcccacccagtccccataggcagggagggtactttaaaaaatatctatttacctggaagagagtaattaatgctcttagtttctaagtgagcacatagtggcttggcatagctcattggtgaatgatatagactggtatcatcctggtaaacttggaccttttagattaaactatatgaaattatcatttttataagtcaaaaattgtctacctaatgtatctgtttaatgatactaagttcaggcacaggaagtcaaaacatcctggagatgaaaaagaacttaaagatctcattctgcttccctctaattgctgacctctttggaacatagggtgctacttactatacatagttatttatctcctgataagttcttatataatccctggaatttaaagattttatttaaaatttgctggctttggttgcctgatttaggggtatcccactgtcctggttaccctcatctggatctatttcagattaggtatcattttaaaaacattatgcctatcaacataatattctcagtggtctgaactaatctacaggaagtgttagttctgtaaactcagtgcttttaaaatgaaacccaaaatgtttgcttctttagcagctgcatcacatgcactgttaccttgttttgttttttgtttctttctttttcttttcccctttgagtgaatggttgtcaagcccttttaaacagactctgactagaaatgcctactatcctgattattggactaggagttaggagagacctagtttctagtctttgatccatgtttgatttgttgtgtgacgctggaaaactcttgcacctggcatcttcgtaacacagacaatggaaagttatatacaatgatagaaaaagagtttcatgtgcatcgaatgaaaagccaaaagtaatggaactgactcacaactctctaaatatgacaagacatatatgcaaatatgtgtcaataaaaacttggggcccattttcagcatatgttataatttaaatgactaggctgggcacagtggctcatgcctgtaattccagcaatttgggaggccgagacaggcagatcacctgaggtcaggcattcaagaccagccttgctaacacggtgaaaccccgtctccacaaaaaatttaaaaattagccaggcgtcgtggcgcatgcctgtaatcccagctactccggagtctgaggcatgagaatcgcttgaacccaggagacagaggttgcagtgggccaagattgtgccactgcacttcagcctgggcaatagagtgagacttttttttatttaataaaaaaaaataattttaggcagggcgcgttggctcacgcctataatcccagcactttgggaggctgaggtcggcgaatcacctgaggccgggggttcgagaccagcctgaccaacatggagaaaccccatctctactaaacatacaaaaattagccaggtgtggtggcacatgcctgtaatcccagctactcgggaggctgaggcaggagaattgcttgaacccaggaggcagaggttgcggtgagccaagatcatgccattgcactccagcctgggcaacaagagtgaaactatgtctcaaaaaaaattaataatttaaatgactatagaaattaacactggaaagccccaaagactcatccttggacctcttcccttctcagtttatactttctccctagatgaactcatttatctcataggtttaaatatcatgtattggtgtttgattctcatattttatccagctcaaatctgtctcctatatactagattcatatatacaactgcctgctgagtcctttcacttgaatgttttatagatatctctttttattttattctatttttttttaagagacagggtcttgctttgttgtccaggctggagtgtagtggcacaatcatggcttactgtagcctcgaactcttgggctcaggcagtcttcccacctcagcctccccagtaactaggactacagatgtgtaccatcacatctggctaattttttaaaatttttttgtagagataggggtctcactttgttgcctaggctggtctcaaactcctggcctcaagcaatcctcctcccaaagtgctgggattacagacatgagccatggcacccagcccatagacatctcaaacctcccatgtattaaaaactgaactcctcagttccaaccttacccatcttcagtctattctcaacactacagccaaatgtattcttttaaaataagtcatgtcatatcatttcactgcctaaaaccttccagtggcttcccaatctcactcttaggtaaagcctaaagttcttacaatggcctacatttctgttcacctctctacttccccaaacctcctccctccccgagatgttcatttcactctggccttactagcctcctactgttattttgaaacacgccatgcactctcctgcttcgagacctttgtacctgttccctctacttggaatgctctttttccagatacatgcattgctggctaccttacctccttcagttcttcaccaaaaattatcaacttctcactgaatcctatcctggctactcttttaaattgtacccagcatggtgactatagttacaacaatgtgttgtattctagaaaattgctaagacaacagattttaagtgttctcaccacaaagaaatgatagggatatgagataatgcatatgttaattatctctgttgagccattccacaatgtgtacatatctcaaaacatcatgttatacacataaatatatacaatttttgtcaattaaaaattaattcattaaaagtaaatatgatacagaactccacccaacattctctgtcaaattttcctcctttatttttcttcatagcacttatcatataacatatatatgataatatatatcatatatattatgttgctaatatgttttgctaatatatcatatatatgataatatatatcatatatattatgttgctaatatgttgctaatatgttttggtcttttcctttctatttaaatgcaggatccatgagaacagagattttttttttttctgttttacattgctctattcccagcacttagaactgtgtttgacacagaagaggtactcaataaataaatattggtgaaaggtgttcagagacgttatacttttatacccttgttgaggtccctaatatactcagtgtgtatgaacaacaaaagcaggtttatgagatttcaaaaaaagatactttcctgtccaaagtgcttgttttgctgaagatactcagaggcttacataggctctagcctcgtctcccttcctaaggctcctagtactaagttttgccatgctttcatttaggaacctctgccagcttttctcaaccagggatcctcatctgaatcacagaacacagaaaatgattttatagacttttcttaattttccaaaagatgatacataactagtactttccagatgcgtaggagagaagttaattcattatgtacaatggatgcttcaaggcattaggacttaatttctagcagaacccaggttgaaaaacgctgcattaatccacgaaactattttataagaagcaaacttctaaaaaactcttcccctaaggaaaaaaacctcataaaaacaaatgaacagaagagacttcttttttaatcagaccgttctcagtgatatatttctgaataagctgtctttgcaatgagttacttggttaaggatgaggaaagaagacagaagtcccttcttcacgattggttctttttgttcccaaactctacaattcttataaagtttgagatattttcagatttttccaaacaacaaaattttgtgtttgtatttgggatgctagcatagctttttacacatttccagagtgttactcatcagtgaagtctgctataacccgacacacaggtccctactgttatttccattaccaaatgaataggttaggcccaagaggaattgcctgacataaaatagtctaataggactaattcagtcagggttctgactgctgcttctcctagcagtaactcacagtatcacagctgctgagaggtaaagcttaatcaggcttgaatcataaaatgtgtatacatgttctgtgagatagattgtggattcttgattcatcatgctgtcttttgattttggaaaataatgaaacaagataacatcccatagtaaagttatattgtacttcatactacttttctacgtagaaactgaacccttttggttatcatctcatttattcgtaagatttttccggtggtagttgggggaaagagagagcatgaggaaagagggaatctgttacagtttacagttggataaattgaaaattggtcacttaaccacttagggttgaagctagatctaggatctcaggactactttagtaggttattggttgttcttgtttatttaaattatgactctgggctttagagtatgctgacaattacaaatattttagaaactctgttcaagtgtgtttgtacatacgtgttgggtttctctaaattttcctaggaacagtccttaatactatctcaactgtcatcatgagtttgttactctgtggcagaaatgagtacggattcaaagaataaatgagtaaatttatttattcatttatttataattcattcatttataattcagcaataacctttccactgtgtttgcagaactaataatatattctcttggtctggatctgtcagccatgtcgtatccacatagtagtacaatctagacaactgatatttttggttcttacctgatagcaggtccgtataaagggctctttgaggccgggcatggtggctcaagcctgtaatcccagcactttgggaggtcaaggtgggcggatcacctgaggtcaggagttcaagaccagcctgcccagcatggcgaaaccccgtctctactaaaaaggcaaaaattagccaggcaccgtggtgggctcctgtaatcccagctactaaggaggctgaggcaggataattgcttgaacccaggaggcggaggttgcagtgagctgagatcgtgctactgtgctccagcctaggtgacagagtaagaccctggctcaaaaaaaaaaaaagggatctttgaaaacaaatacattttggctcaaagaaaaacattggttgaattaactgtaactacttgactcctgttaagaaagtaaaacactgttttttccaggttttagaatagagaagtggtgtaaagatttttttctttgagttggtgtggggaaatggtaaagccagaaattggaatgcttctcttaaggggaaattttcaaattttgttttgctttttggttttcttctgactcattcttagaaactaaagaggcataggaagggcaatctcttctgggtagagttaggactccagtctcaacctctcaaatcactgccagccaaccacctgctgtttgggtagattagtaggagatgatggaggtataaaaaaagataaactgctaaatgattatgtatgtatatcattcttttcccattcaaaatcttaaagctgagtaagaacccttaaagatgttatatctggaactgaatttaaaatatgtgctaaagtgggtaatatcaggtatcatttattgagtgcttaattactgtatgccaagcattgcagtaaacactttacatacattatcttacttaatctgcttaacaacttgactctgacaagtcatgttctcctattatatagtcttatgacatcctgatttctgctttatagcacacattacagatgtattttttaaagctctaaataattaattttgtaactagttatttcttttttgactcactgactagactgaaaactccatgaagataaggaccatctatatctgtcctgtatttccagcacctaggctatgcctagtacataatagatgcataactaaaatttgaataaacacctgagtgtgtgaatgactgaatacgtgaataaattaacaactctttcaaacggatcagctccactttatacacccaaaaacagagactgagacttaaaccaaagactgactccagaacacatgaccgctatatttaaatggccattgggaagcataaaaatcatcatgactctgaaaaagaatttgagatttcaggatattctgaatatgaacactttcttcaaaagtaattttccataaatctggatcgggattagagatggctgttatctttttatctctcaggtggtagaagcatggttcccctaagcctctgatttattaggtatttctgaatattgattagtaaaacagatgacttcccagaaagctgtgtctgggttctgttgccaaaagtactttgagctttcactcaccctaggagagggaaccacaaactttttgtacagattagctcctttcaagaacaaaagtctctttggggatttactaattccctcacctcccctggtgcccatgttcattcctgttgcctcgtgttaggactttgctccagctccaaaagagattctgaagcccctgctgcccaaatggtttgtagtgccatgcctgattaactgggcaaggtcagacttgccttttacagccctcgcagaggtagaccctttgctaagaaatctcagaaatgccttaattctctgcatataagtagatcagagcatcgtagaccgtaggcactctgagctttcacagttttctacccttaaaagtgatggcagtacttattccattgagagatacaaagcgttttctagagagtgtttcttaaccccccaaaaaacttgggggttaagaactatcttcagaagctcaaacacaaatcagggaaggacactgcttcaaataatctagcaaatggttagtaactacagaatcctatgaagactaaaaagaccccagctaagcatgtgaatagtagtagcagcagctgcctgttaaccacgataaaaagttttaggcctttcacactctagtatatgttgctaaatggattagttatcagagcattttattgtaccaaaggaggatttattcacttctttgggagtctaaaatgcctaacgccagacctactgaggccagcaagaagggagagcacattgaatacttcattgtcaatgtctaattgggtctgcaggcacaattcagcctcatcagagtccgtcttaaaaaagaaagctctgttaggtcagacaaatactttttgtgtggttcttaattactttcccatggattccttgttttctaggtcttatctgttcagtaattgtactaaaacacaaattatatcaaacatttaagcagcacacagagcagagtagttagaatcccaaaaacccatatgttaatgaccacgatcttgcattaggaactttaacctaatgctaccatggtgtaaccttttctttttgcgtattcaaggacctctgcgtgttctgaagataaagttagccctacatttcaagttaaggctatccaggaagaatgtctttggcaatctctttcagcttccctcttctggcatgtgtatagcctgcaggtacttaacagaggtaaaaaaatttatatggtgctaggtggctagagaagcttcagtttgctccatggtttggaattttagaggaagcatttttttttttccgagtgttttttattctgtcattccagcggcttcatatacagatagctctgatgatgagacatcgcccagggacaagcagcaaaagaactctaagggaagcagtgacttctgtgttaagaacatcaaacaggcagagtttggacgaagagaaattgaaattgctgaacaaggtaaagaaaacaagcaccttttccttcttaacctacctgtgtctttttgtccatattaatccctttttatgtctggggtctggtagcttgtgaaatttctatgtgataagaatacttataacaaaagaaatgtgagttcaagaaacactggggaaatctggcaagtctagaaggaaccctgtattaaaaaaaaaaaaaaaaaagggagagagactggataaggactggaatatagagaatcagaaccctggagcatttgcctccaaaagccctttataaaggaaaatacaggtttaatgtcttgatccctggagaaacctaatctaacctgatcaggggaaggatcttaacttaagaaaacaagtttttctgtttgttcttttatctcttattccttcttctttaatattgctgtatttattgggccttttcagaaatgcctgcattgatggctttgaggaagagagctcaaggagaaaagcctttggctggagccaaaatcgtgggttgcacacacatcactgctcagactgctgtgagttcttttcttttctccttttaattacaatagttaataatagccacgagctactgaaagcttacaacatgccaagcaccgagttaagagcttaacaagtattagcttattaatccttataatggccatataaagcaggtattcttgtttccattttataaacgaagaagctgaggctcagagggcttaagatatttgtttaaggttatacagctagaaatcacagagtcaagattttaacttcaatatacagtagtccccctgccttgtctgtgggggataagtttcaagacccctagtggacacctgaaacttcagacagtactgaaccctatatatactatgttttttcctatacatatatacctataatcaagtttaatttatgcaattggccctgcatgtccaccagttctgcttcctgaggatttgaccaactgcagatcaaaaatattcagaaaataaaataatacaacaatacaaaataacaagaaatataacaactatttacatagcatttacactgtattgggtactataaataacctagagatgctttaaaatatacagaaggatgtgcacagattatatgcaaacactgcatcattttatataagggacatgagcatcctcagattttggtatccatgggagtgctggaataaatcccctgaggatactgagagacagctataaattcagcacagtaagaaatgaacaacagtaactcaaaataaaagagagcaattacaacaacagactgtaataaaagttatgtcacataaaggaatttatcacagtacatagcagaaagtccaaagggaaggcagacttcagatgcaggatctcagggctccagcttcacctctctgattctcttggagctgcctcctcagtatgcttacttcaccctaaagctgatagcaagatgcttacaactattctagtcatcacaaactgacatgaaaaggaagagggaccatttcttcctcactcaagagaagtccctccaggatactccatcgtgtctcattgggcagaactggatcatgtatctgtgctccaccagtcctaccgaggggcgtggaattaccatgatttgcttacaccagtgattcctaccttactctcatcagttttaatgtcccctttttattaaaaaactttttttttgcagtgtccctgaactatcctgaaatgaaattcagatataacatgtccaggtacatataatctttaaaaataaatcaatataaaatcttaactgaaatatgaaggaggaataaaaaaagtacaatacttaaaataatgtgtatttcaatatgtaaatacttgaggacaactatagtagaacaatcagatatttgtactatttcacagtattatttgaaatagtattatttgaagacagaaataaatgtgttattgattccagagcatcagagcagcattgccatgattttctgaaatagtaaacaactttttgtaatcttctaaacaataagaacaacaaaaagtatgagttttctcttcatttacatagctgttacattcctggaaaaactattgttttgtattaaaactacaaaactactttttgctaatttgtaaagtggaattaggttctaaactcagataattgtagataggtttttcacccatgggaacttttattgggacatttgaaaattgtaccagctgcaacacagttttttgttgagacactttcaaaatgtccagattcctggtcctgcccactaaatgccaatagcactccccttccaattattgtggcaaccaaaaatgcccccacaattttctagatctcctcttttatcaccagagatgcaatatatatggagttgctaaccataatgagaccactatcgggaaattgttatattgagcagtggtctggaatcttttatggggattcataagatctgggtcatctgtgtggctagatcagctttccaaagattgtctctcccaaagcacaacacttatgtggtcacattcctgattaagaacattagagattcctcaaggtacagacagcttctattagcatcttcactatgaaacttttctgggttatgtgttctctgaggacaagagtaccctgactgctcaaaattaatataataaattgaaaagctatctgttttggagctacaaactaatgaatcaagacagaaacactcttgaatcttttttggcctgctcagtcagcgacatgagacttcagtgtggtagcttaaaatagtaagtgcttctctactgtctcatgttgctgaattacatctagtttgttttttacccttaggctcagtgagcattaccacctttcatggttccctttctatttttttcctgaatggattgatcacaattagcttaccaattttaatattaatttattgtttccaccccacatttttttcctttaaaaaaataacgacaaagaaattatgctttgtttgccaacctaatactctttcactcttgtcttagttcatttgggctgctataacaaaataccttagactgggtaattaataaacaatagatatttattgttcacagttctggaggctaggaagtccaagatcaaggcgccagcagattcagtatctggtgagggcctgttccttatagatggcgctttctatgtgccctcacatggccaaaggggcaagcaagcttcctcaggcttgttttataagtacactaatcccatttgtgagggcagaaatctcatgtctaatcaccttccaatcacttccataatcaccttttaataccatcgcctagggggttagtttttaacatatgactctgggggaggagaacatacattcagaccatagcaatccccaaatactttagtgtgtattttctacaaagaaggacattttcctgtactagcagtataaccatcagaagtagaaaattaacattgattcattattaccatccaatccttagatcccactggagtttcgcttgttgttctgataatatttttctaacaaaagaatccagtccatggttatatgtcacatttagttgtcatgtctttttaatcttcattagtacagaacagtttctcagtctttctttgattttcatgaccttgacacttttgaagattacagatgaattattttgtagaatttcctcaatttggatttttctgatgcttcctcattatgagattcaggctatacatctatggtgggaattcagggaagtgatatatcctatcaggtgacacatgatttcagtttgtcccagaactgatgatattcactttaatcccttgattgaggtggtgtctcccaggattttcctctgtaaaagtttttttcccagtttataattaatatgttttttgggctgggtgtgatggctcacgcctgtaatcccagcactttgggacgtcaaggttggcagatcacttgaacccaggagttgaagactagcctaggcaacatggtaaaaccccatctctacaaaaaaatacaaaagttagccaggtgtggtggcatgtgcctgtagttccagctacttgggaggctgaggtgggaggattgattgagcccgaaaggtcgagattgcagtgagcagtgagctgagattgcactgcactccagcctgggtgacagagtgagaccctgtctcaaaaataaataaaaatagaattaatatgtttatgtgagatagtactatgaaactgtaaatatctcattctttatcttactttgatttattcattatttttatttgtatggaatcattgtttcctattttatttaataggttataatccattactatcattacttatttacatgatcatcttgttcccagtttgaccagggagagcctcttcagtgtggcttctgtgacttcttttgtcttttgatatatccctttcattctttgaacatttccttgcttttggtacaagatcacctaagctcatcttgaacattccatgccctactcttggaaccagccatttctcccagaatgcctagctccttttagtggatctgggcactaatgtgctctttgcttttgaaatgtcattgttcccagatcctcttttttccctctccatacatgtaactggagttccagaaggcaaagagggaaagaatccatagactcccatagaccccatagattttgagcactccgttgtgatttttttctgccagtcttcttctttttgtatttcagttcagtaatttctttttttgttgttgttttgttttgttgagtagggtctcactgtgtcacccaggctggagtgcagtggtacaatcattgcaggctcattgcagcctcaaactcctgggctcaagcgatcctcctgccccagcctcccaagtaactgggactacaggcatataccactatgcctggctaattttttttaattttttgtagagaagagatcttgctgtgatgcccaggctggtctcaaactcctggcctcaagcgatctcctgcctcagcctttcaaagcgctagggttacaggcatgagtcactgtgcctggctcagttcagtaatttttattggtctatcttcaggttcactgattctgtccttggatgtgcccggtctgatgataaacctgttgaaggaacttttaatctgactttttttttttcctggcatttgtatttgacttttttttttttttttttttttttgagacagagttttgctcttgttgcccaggctggagtgcaacggtgcaatcttggctcaccacaacctccacctcctgggatcaagcgattctcctgcctcagcctcccgaataactgggattaaaggcatgtggcaccaagcagctaattttgtatttttagtagagatggggtttctccatgttggtcaggctggtctcaaactcccgaccccaggtgatctgcccaccttggcctcccagagtgctggcctttacaggcctgagccactgcacccagcctgtatttgactttttattgtttccatctctgctgaaattttctatctattcatagatgttgtctatctttctcaactagatcctttaacataaacatattagtccagcctgggcaatatagcaagatcctgtgtataaaaaaatataaataaataacataaacatattaatcatagttattttatatctcctgtctgatcaaacatctggctcatctgagagcctgcctctgttgtttacttatttcctgacagtgggtttttttttttactttttgtatgtcctgacatttttaattgagtggtagtatattagttttcgttatagtcatgaattgggctgaatttagagttcattgtatatcaacaaaggcttcaaattcctccagcagtggactgctataaccttgtgatttgaggttaccaaaggacattcctcagtgcttctgctttaccctcagccttcagctacttctgcacatgtgtgccacagaagtgtcctcttttcaagtacctgcctcatctgccgcactagactgctgctctttgtttcctggggctaagcacacggtgagggcaagtggggttcttggatctctggtgcagtctcagtcttaggcagacctctgtgaggggcagggttttctcaatattcctgcctctcctatctgtagcagccaaactttgccttgaatctgtggtgggtcttgggcaagacatattttcctgcccttcctggagagctggagaggtagcagatccttactttgtatcagtgaactgtcctgggcccaagaggttttcctgtgcctctcccagaggcagagtttttgcttctgccttcctccagacacagtggatctttgcctagtccctaatggcaggcccaattcctgctcttcctacagcttgaggctttggttcctatgagagaagagtgtagggaagtgcccaggtttcatgtctgtttctgagcacagccaatcagctccctgccccagtctttgttttgagcactgggtggaagcctctggaaaacagcctgcatgtgaatgggaaatctacttgtgtctggagcttcaaaaaattccacattgacacactttcccacacccagcctttcgtaattgttcaaaagtttagctgatattttcttattcttatctgtggcagccatttcttccccccatgcactgccaaaggtgaaacagtcttccctctctctttaaaaggatttgtcactctttggagggcagttcacttctgtgctttatgacctcaaatctttgatgggctcaagaaaagtttggctttgtagattacccagtttttggggtttgtgtgtgtttgtgtgtttatttgttcatttatttgtttgtttgttttgttctgttttgagacggagtcttgctctgttgcccaggctggactgcagtggcacaatctcggctcactgcaagctctgcctcccaggttcacaccattctcctggctcagcctcccgagtagctgggactacaggcgcccgctaccacacccggctaatttttttttgtatttttagtagagatggggtttcaccgtgttagccaggatggtctcgatctcctgaccttgtgatctgcccgcctcggcctcccaaagtgctgggattacaggcgtgagccaccgcgccccgccatttgtttgtttttgagacagagctttgctcttgttgcccaggctggagtgcaatggtgcaatctcagctcactgcaatcttcgcctcaccgtttcaagccattgtcctgcctcagcctcccgagtagctgggattacaggcatgcgccaccatgcctgggtaatttttctgtatttttagtagagatagggtttcaccatgttggccaggctggtctcaaactcctgacctcaggtgatccgcccacctcagcctcccaaagtgggattacagtcgtgagccaccgttcctggccgtgtgtttggttttttggagacagggtctcactctgttgtccaggctggagtgcagtggcacagtcatgactcactacaacctccatctcccaggctcaagcagtcctcccacctcagccttcctagtagctacccagctttttcctgtcgttaaggtgggagcttctcttgtagctttgtatgttctaagcagaagcagaactgtaaatctgttttttcagaaaagttttggctctgaagtccttggtttattaaatcttatggggaagcttaatttaaattggtaaaaacatagagtcagctggagcctccctcttcccatggcttcccccaatacttgccttcttagaatactgaagaggttctgtagagcccaatttgaaaatcactggcttaagtcattcccgttgtattttctgattgtaaaatatataaactttatctccttgactagttgtttggcccaggcttgctcataccctgctttgtctttaatacaggtgcttatggaaactctgggtgctctgggggcccagtgccgatgggctgcctgcaacatctattccactctcaatgaagtggctgctgctctagcagaaagtggtaagagcttattctctgtgcctttggctaaagtaagtctatttggagacttactttatgtttcagcataaatctttaaagaaggttgacaataaaagaactatcttggaagaaatggatctcgattcttcatgaatttgctctttttctggccttcgcttgtcaaatatgatctagttaactttgctattttacagttgacaaatatctacctatgtctaatattctattgttaggtaatgctttgttttaactcactaattcactaatagcagagcactagtgaacactactcactgaggtaacatggattaaaggagaaaatgcttcagccatagttttgtgactctgttggttttccagcaagtaatttgccctgacttaatgtttggtgtttctgcttcaggagtaaagaagacttgacctggcagattaatatttgatcacaacatccactggtacttgatggacaaaagaaatagagaaatttggactttgccagcctcttgcctttactctttggcagtacagctagcactctcagcatttcatttgttctttcattttaatttacttatttataagattttatggctgtatatatgatagaaaaatatttaatactttattaatacaaatattaaatgtgtaccccagtgaattgtacatacgcattcatttcttttcctttttttaaaagtagaaacggagtcttgctgggtcacccaggctggggtgcagtagtgcagtcgtgtttcactgcatccttcaattcctaggaacaggtgatcctcccacttcagtcttctgagtagctgggacttcaggcatgtgccaccatgcccagctaatttaaaaaaaatgtttgaagacacagggtcttgctgtgttgctcaggctggtctcaaacagccagcctcaagtgatcctcctgcctcatcctcccaaagtgctgggattacaggtgtgagccaccatgcccagcccatttcttttttctgtttttttttttaaatttaatttaatttttattttttatttttatttttatttttatttatttattttttttgagatgaagtctcactctgtcgcccaggctggagtgcagtggcatgatctcggctcactgaaacctctgcctcccaggttcaagcgattctcctgcctcagcctcctgagtagctgggattacaggtgccctccactatacccggctaatttttgtatttttagtagagacggggtttcaccatgttagtcaggctggtctcgaactcctgacctcagatgatctgcctgcctcggcctcccaaagtgctgggattacaggtgtgagccaccgcacccggctgccccatttttttttttaaacaaatgcttactgacctacgctaagagctgtaagggcaaatgagacaatgtccttaccctcagaatcttatattttggtgagataatacacatatataaataatgatgatacaaggacatatataataaatgccatgacagattataaatccatattcactacacaaacaagaggcttaggaaagttcagattcccactttgggaagctgaggcaggtggatcacctgaggtcaggaattcaagaccagcgtggccaacatggtgaaaccctgtctttactaagagtacaaaaattagctgagtgtggtggtgcaggcctgtaatcctagctactcatgaggctgaggcaggagaatcgcttgaacccaggaggcggaggctgcagtgagccgagatcgcgccactgcactctagcctgggtgacagagtgagactccatctcaaaaaaaaaaaaaaaaaaaaaaagaggccaggcgcggtggctcacacctgtaatcccagcactttgggagcctgaggtgggcggatcatgaggtcagaagttcgagaccagcctggccaatatggtgaaaccccgtctttactaaaagtacaaaaattagctgggcgtggtgccacgcacctgtagtcccagctactcaggaggctaaggcaggagaatcgcttgaacccaggaggcagaggttgcagtgagccgagattatgccactgcactccagcctgggtgacagagcaagactccgtctcaaaaaaaaaaaagaaaagaaaagttaagattccttgagagctcatttccagctgggttaatcagacttcattaggaacatgacacttaactgggctatgaattctagtaacgttttagcaagtggagaaacacgtaagggtttttttcttaataatagggtggaatgattaaagtatagaagcaagaaaaattaaagtgtaattgggaaatggtgagaatgccagtttgagtggatcaagaagtacctgtttctggtttttgttttccctttagtcacttttttttttttttttttttgagacagagtcacgccctgtcgcccaggctggagtgcagtggcacgatcttggctcactgcaacctccacctcccaggttcaagcaattctcctgcctcaggctcccaagtagctgagattacaggcatgcaccaccacgcccaactaatttttgtatttttagtagaaacaggtttcatcatgttggccaggctggccttgaactcctaacctcaggtgatccacccacctcagcctcccaaggtgctgggatttcaggagtgagccaccgcacctggccccctttcattacattttaaacaactgtcatacttttgtccattctgcttgtcctccttgggctaataagagcagaatgaccaacaaagacaaaggaatggataaaggggctgaaggcaacgccaatcagtgaagaatgtcaatccaaggagtatagcagaatgagagagttggaaattaggaaaaaccagaatcttctcactaaaattagggggtcagccttttttggtctttaatggtttccctttgttcctttttttcccaggatttcctgtttttgcctggaagggagagtcagaagatgacttttggtggtgtatcgatagatgtgtgaatgtggagggctggcagccaaacatggtgggtcagatttctgctaacacaattctgtaggggtcaggaatggggatgggtggaggttatggcctaggagagggtttcccaacaagaaggaaggaaaatggcttcatttctatctgatatacctgggtttccagcagaactagattcttatgctacgggtaccccaagagtattgaagctcttataacctcagagtgccttaattattggttctaatgttggaagcatttatattcattagaaacattaaagcactgcccaggattcacatgtggctggttaaaaaacaatagtaatgagtttccatcccctgctactgcctacttcccaccccttacaacaaccaaaaaacccaaacaaaccaccccagaactctggagatacttagccttctctctagaatccatatacttgtaatgttagtcaggactagaaaaaaaataaaaataatattcatataatgaatttatagtaaacctgaagagcttacaagttcaaatttcttctctttatattctttccccacattaaaaaagacgagatgaagttttagggttttaatttttgcttcatttttatttttgttttattttttagaagatcaagtcttgaagcctcatagcacattagatttgcaaagaggcaaaaagctacacaaagggccaggtgtggtggcctgtaatcccagcactttgggagcccaaggcaggtggattacttcagcccaggagttcgagaccagcctgggcaacataggctttctacaaaaaatacaaaaattagcaggatgtgttggcatgcacctgtagtagtagtcccagctacttaggaggctgggactcctaagtgggaggatcacttgagcccaggaggtggaggttgcagtgagccgagatcacaccactgcagtccagcctgggtgagagagtgaaaccatgcccccatcccagtgcccccccccaaaaaagctacacaaagtataaggtgctcctattttgcaaataattctgccctctcccctagggggagggggcagaaattagggaatgtactgagaaaagaatccctgaagctctagtccaaccattgcttgctgctgaaggctgcagagcaggcctcacttggtgcatggcagagaagtagcttctttctgaattctgtgatccaggtcacactgcaccaggcttgtttgaggaagctgggttagagcttcatatcctaaaggggtgggggagcagagttgacagtggctgtaagatgagtcagctcattccaacagttttaatagtgacacaagggagtgtgactgacagatgctgaagcagatatgccagggggtttctcctgggaataaaacattgatttttaaagtcaggaacccagggaggacattaggattatacctggagaacttttacaaactgtagaaccagcacaaactgctaggaaggttaataaagagagtaagacaaggacaaaaacagttgtcaccccagaaaacaggacccatacctgtttggattctgtcaagatttagtacttctccttgcttcccaacctctggaagatttcctgatgacaataattttctgcagtagatttatatggtgagaattatgggcagcattcattaagtaaatcttagagacagcaactactgtctctagtggataagaatagtgaaacttacaacacagagtttccagttgttcaatctctcttgtctcttatcttttctgtggaagggaaaacttcatcagggattccatacatggagaatgggagagagaaactcagaagagctttttgctttcttggggcatctgttctgggggtttctacttgtagtatggagcaagtacaagagctttgatgagagtcctaacttggatcctggttctcaagcaaggtttgagtgagagaaaataggtcaacagcaagagcaaaagcaaaaaagagatcaggtggtagacatgaggttggggattttgtgtactctggggtccagaatggcagttttggcacttatagtagagttgataattgatgagactgcaagatgggtgcatgtcagcagagggcaacccagttctgtgggactttccaggaggatgggtataacaatttgcagagtcctgctaaacacttctgacagcctagggaaggactgaagtgtcacagcctcgtgcctaacaatgttctaagctggtttttctttagttttataattcaaaagcttttctctgctgatgaaagctccagtgggcacagcgttgtgtttatctttaatcccaacctgaaatagtgatagatgagctgttcagaggcatgcttgcacacctacatgctgcacggttccctggttatttttaatttggtttgtacagagtgtgaggttgtgctaggcaaaaccctacagtgctgcctgatattttgggtgggagagtgcctatactttgggagaagaaaaggattaaggaatacagttttataaaccattgttctgacagggagacttaattatctgaccatttattgatttatttttcttttttttctcaagaggctgtgtaaactgaggctgtttatttaaactaagtcttgactgaatatatttaaagtccctttaggctttctgaatacctatagtagattcaagatctagtggcctagtaactacaagttaccaatccataagaaaatcctcggttagttgctgtatattttgatacagtagatatgtcacggggagggtcgtttggctgcgcgaattacaattggcctttctcctctcattgtcttttacttcaatataatgactatttggcagattattgtatttactctggctttaagttactttgcataaccatatgggaaattttaaatatctgtaaattgctaattagattgggatgcaagacccagagaagcactgaagccttgagacttcagcaaagtgaatgatgttattgatgcttactattgcagatcttggatgatggaggggatcttacccactggatttataaaaagtatcccaacatgtttaagaaaatcaagggcatagtagaggagagtgttactggagttcacaggtaagatttgacatgggcatacctggttttatgcagtctagacataaaatcttataaacacatacctataaaacacatgttaaaaattggagcctgggccaggcgcggtggctcacgcctgtaatcccagcactttgggaggctgaggtgggcggatcacgaggtcaggagatcaagaccatcctggctaacacggtgaaaccccgtctctactaaaaatacaaaaaaattagcctggtgtggtgggcgcctgtggtcccagctactcgggaggctgagggaggagaatggcatgaacccaggaggcggagcttgcagtgagcagagatcatgccactgcactccagcctgggtgacagagcgagactccatctcaaaaaaaaaaaaaaaaaaaaaaaaaaaaaaattggagcctgctatgaggtaaccacatctcagcttgctatgaggtgaccagatctcagcttgctatgaggtgagcagatctctcttgttttttttttttaattaacaacacaaataatgaacctaaaatagtgagaagggggcaggtgggagaacaagtgaagtcctcatgttttctagtgattgtaaacaattaacttgtcctttttggacacatatattcattcattcattcaacaaatatttattgaacttctacaatgaatgaggaactgctctagatgctaggaatctagcagtagacaaaacagacagaaaaaaactctgccatcttagagcttacattcttacatggagagcaaggatgtagggttctgcttctcaaatgagtaataattctctgagtaaaattggaattatttcagttcaatttctgtgatcatttctatgatttatttcacccataaagaactaaaagtatgaaaaaaaaaagttgtagggaagtaaattctgaaccagccaccatcactgcttcaatacattatcatctttttgaatgtacaaaactgaggtcaggagttcaagaccagcctggccaacgtggtgaaaccccgtctctactaaaaatacaaaaattagctgagtgtggtggcgggcgcctataatcccagctactcaggagtctgaagcacaaaaatcgcttgaaccctggaggcagaggttgcagtaagctgagatcacaccattgctctccagcggggacaacaagagtgagactccatctcaaaacaaacaaacaaacaataaaagcacaaacagccaggcgtagtctcatgcacttgtagttctggcaggcagggagaccagtgcagatttagtgaacattgtacctagtaggtaatttttcaaccttcaacccgctcccactctcccactttttatagtctccagtgaaggccttaaaatttagaggtgggtcaaggatttcccccacatgacttttgaataaaatctttattgtgaagctatatatgcaggctctagaaagatattctttatttctcagtggccacctaacaggatgaaactagtcatgtctcatggtctcatgcctacccaatcaacgtatttctggggcctcctatgaaagcaatggtagattgtaatgtcctggtgttttttgttcttggcttccctcatcctcaggctgtaccaactgtccaaagctgggaagctgtgtgttccagccatgaatgtcaatgactcagtcaccaaacagaaatttgacaacctctactgttgccgtgaatcaattcttgatgggtaatgtttattatctttgagatgaagttgtgatgtccagttgagattctaagttttttggctttggttatttctggaaaggattcatgtagcacctctggataatgtctccataaagccagagctttgtcacctcataaattaaaattacattatttttattttctcctttgtatcttttctatttctaaatattatattttcaaaatattatctaataaatgtatgttgcttttatgtttaaaagttactgtgttatctacatcttcttcctttctgcaccacttgcaagaaaggggaaaaaaaaaggaaaaaaacccttacatataggattggttagatggcagggagtgagaaaatatgtattttatttaaccttcctgtctggtcattagtttctctaggatagaaaccagactttcagtgttacaggtcttttagaatttgtctagcaggttttctggtctttaccagaaaacccctttaaaaaaataaagaaaccagactttctttcaaaatgaaaaaccaaccaaaaaaccccatgaaaacaaagagattcaatctaacctcaagggagaaacaagagaagatttttctgatttaatgtttttttttcccctagacttaaaaggacaacagacatgatgtttggtggaaagcaagtggtagtctgtggctatggagaggtgaagtttaaccttttgtttattaggtgttttaaatggattttgttgaaatattctggaattttttatttgtatggacatatgagtacaccctttaccactttagatgagaaaaagaatttcagaggccttctggttgaagtagactttctttttccctttgcgttgccgccattttcccttaagttgattttctgacttgctccagtaccaccgtttgtgatgttctttttagcttgtgttttaattatgaatcgtgagtgtgggtgttcttgtgcacatgaatgcgataagcaggagccaggggtttgtttatgagctgcattcaattatttgttcttctcgttttccccaagtatgaatctattcagtgaaattcctctcgggggtggaaagagggggtgcactttaccagaagctttgagaaatggttttctcagtgactttccttaatatgtgtgctctctcccctcttcaggtggggaaagggtgctgtgctgccctgaaagccatgggctccattgtgtatgtaactgaaattgaccccatctgtgccctgcaagcctggtaagcctctacgctaccatctcacttgcaatctcggagctgtctccaaagaatggcctggttgatgccacactttattttagaggagcccagatcctcagagatgctgccactaactctaagcatctgtcttttaaaaaggtcaaggagctctgcttggagagagcagagactatcagaaaagcgaaaatttagaaatcctgtggagatagtaacagggattctgtcagccagagaacaggtagccccttaccttctccatgtatgatacttgcctttcaaataatgatcagaaaagaaattggcaggcatcagatgccttctgatgtgttacactgaaaatagcccttctgtggtattcctcccaaaaatgtataacctgaatctaattgtgaggaaacattagaccaatcccagttaagggtaaaatctactaactctgagtgaagcatatatgagaattatttacactagtattataattcttaagtttgaaatgattctaaaattaaaagttaaaacttttcttatctataaaatgtgtgtaatcatacctacctcataggattgtgagagttcagtaaaataataattagcataggctgggtgtaatgggttcatgcctgtaatcccagcactttgggaggctgaggcaggaggattgcttgcgcccaggagttcgagaccagccttggcaacatagggagaccccatctctacaaataatttttttaaattagctgggtgtggtggtgcatgcctgtggtcccagctacttgggaggctgaagtatgagtatcacctaagcctgggaggtggaggctgcagtgagttgtgattatgccactacgctccagcctgggtgacccagcaagaccatgtctcaaaataattattattctatattatacattatataacaaatacataattatataaggtacagagctgctgccacataatatatgctcattaaataatagctgttattaaaattgtctcttgccatcctcagcagggtgggaaataccactgttcttaaaaactattgcagagtccaagtgtctgtagcctaggggaaccatcatccttctggtacactaagagtttaggaacctgaacatattttaatacaaattgatactgttcagatactgaacagttcagattatcctgttcagattatcctgtagacacgaattgatcacttactatgcattagatactgtgctatgtgctgagaatgaataagatgaatatataaatgagataaggtcctgcttttagaagcacacagacagataaccactgtgcagcaaagtaagtgctgtcatggagttaaacggcacatgcttctgtaggagcataaaggagaaattgcttactgaagagcaagggagcagggtagaaagagatgtcagcagagctgagtcttgacatttgtataggtgttttcttagtttggaagtatattccaggtactgggaacatgtgtgttgtctccaaggaaggagatagcatggcagatttaagaagctagaaatattttaatgtagttggcagatgaaatacatttgggggagtggtactatctaaggtaggagtcatgggagtcatatgtcaatataatcacatatcactgtaagtatttgggtcttactcttatcctgtcttatccttaagaacaggcagtctcactgaagtattttaaggaaaggaagcgacatgatccaaattgcatttaggaaaatcactctgccaaatgatttagaaagatgtaaacctagaggcaatgagattgggccaggggttactatagtaatctaggcaagaagtaataagacctaaacttaagcaaggccagtatgtattagagaagagtagagagatgaaagagacgtttatggaattaaagaaaaagagtcacccagatttggtgacaacttcaattcaggagaggcagcaaggacattcttgtttatatggctcattcagttggatgaacagtgatgctattgatcaagatagaaaatatagaagaagaaatagatgagattatgggtgcagagaaaataataagtttattttcaaacacagtaagtttgagatccttctgggacattgatgaggtgctatccagtggctaatttgatccttggctatgaagcttcagagagatctaagctaaagttacaaatgtaaaaatcagccatctatcagcagtcatttgcagccaaaggaagagtatggttctctatactgaaagaatagagaaaagaataaaggcataaccctgcagagcaccaatatccaaaggttggctgaagttgaggagaggcaattaagagaagtaagaggaaaaccaggagagatgtatcatggagtccaaggggtatagagttttaagaaggcaaataatgtttaatgtagtagaagaaatcaaataatataagagtctaagaagttgggcatggtggtgtatgccaatagtcctggctactcaggaggctgaggcaggaggattgcttgaggccaagagttagaggctgtagtgcactatgattatgcctgtgactagctactgcactccagcctgggcagcatagtgagatcccatctctaaaaaaaaaaaaacacacacagttaagagtctaagaaatcttgggtttggccttcgggggatcactgatgatcttggagagagcagtttcaatggggtagttggttaaatggctaagtggcactttctacagtttctagaaatttggtcagggaatctcatggtagcccctggctccctattatcaggaagaaataagttccgtgatgcaaacgaaccttttatttctgtcttgtatgaactaaggaaattgtttggatttttcacttctaagaatagttcagctatctcaagaaatgacagcaacttgatattagcttttgaagtcctgtgttaaaaggctccccagctgcctgtttaggttaatgggtcatgctttatttcaacagtatggatggatttcgactggtgaaattaaatgaggtcatccgacaagtggacattgttattacctgtacaggtatgataatgacattttaaatggggtggcacttgggaatgtttttatggagcaggtgcaagatgattggaaatattctgaaaaaccaaactctaaaagctagagagagatagtagcccacaaagccagccagtctttcacattcttcctaattctttagagctccgaccaaaggtatacgattaggttattcctatgtaaaaatgtttctcttcacccttgaagacaactgttatatctccattcatcctaggagatagctagagatgagattcacttataaagttttatttgggaagccagatattttttttttccaaaaatatatttatttttaaaaacagaaaatcagatcagttttatagagtcaaattttcaagagacaaaccagagtttggattccagcttagagtgcaagtgaagcatcagtaatctcatgcagaagatttgtctctgcaggaggtacattctgcttgactgcaagcactcaattctctaaatctggtttgtacttctgccatcattttattccattccagcgctctggcatgcaagataatccatctctaaaattcaagacttccaaattgagatgaacgattattgggcttgggttggggtttataaccaatccgatcattgatcatttgttcccggctcttgggatcactgctaagcccaatggctccttctccatcactgcctcctacaacttccacatcttccttctgtttcttacgggtctccaggtcctttcgaatgttctcaaactcttcaatgtcatcaagctttagctctaggcgtgttggtttccgtctcagcatactgaagtcaacactaagggccaaacccagtgaactattagcaattcacaggattatcctcagcgtccaaacagatcttaaatgtgtacgtcattcattaaacaaacacttcttgtgttccagctacagagttaaaaggtacagtcataatctcttttcaagccgacctagccccttccccgggaagccagatcttaaatgtacacttgattttttattttacctccaaaagtgatgtatgtttctctctagtatgtaattaaggcaaggctagagagaaattcttcatagttagagaaagtagacgaggttattctgttaattcccaaagaggtagattttgagttttaaagaatatgcagaaatggctagtttcctctagggtaagatacttatttttatgtggaaccataaactacaggaacactggttttctaattctattttagagggggaaatcagacagaataaaaaaaaattgtagttgtagcctcaggaagaaataggggcagagaagagggaccataagaagctgttcttggttcatatcaatcccctggatctcttttgttgttttaaatagagatgaggtctcagtctccaggctggtctcaaactcctggcctcagcgtggttctcccacctctgcttcccaaagtgatgggattataggtgtgagccaccctgcccagcctggacctttttttttttttaattgcttttttgtgatctgtaattcattcactgcacatttcacacatttaaattgttcactgttttttagtaattcacagagtttgtacaaccatcaccacaatctaatgtttttactgagttgtaattcacattgtaatgttcacgcttttaaagtatgcagttcaatggcttttagtaaagttgtagaacatcccaattatcgaatttttatcaccccaaaaagaaaccccatatcattagcagtcactccttattccatcctccatcatccgccaggcctaggcaaccaccatttccctattctggacatttcatataaatggaatcatagcaacacctgtgaaaagaaggggaaaaaataataattttttttaaaaaggaatcatttatggctgggcacggtggctcacgcctgtaatcccagcacttcaagaggccaagatgggtggaccacctgaggtcaggagttcgagaccagcctggccaacatggtgaaaccccgtctctactaaaaatacaaaaaattagccagatgtgatggcaggtgcctgtagtctcagctacaggagtgtgaggcaggagaattgcttgaacctggaaggtggaggttgcagtgagccaagattgtgccattgcactccagcctgggcaacaagagtgaaactccttctcaaaaaaaaaaaaaaaaggaatcattcaatatgatgttttcagggcctccccatgtgatggcatatatcagtaccttattcctttttattgctgagtaatgtatcattgtatggttatactgtattttatttacccattcattaactggtagacatttgggttgttttcactttttggctattaggaataatgctgctatgaacattgaatacaagtttttatgtggacatattttttcagttcccttgggtgtatagtaagagtagaattgctggatcatatagtaactttgtttttaacattttcaggctgggtgtggtggctcacacctgtaatcccagcactttggaaggccgaagtaggcagagcacttgagcccaggagttcagaccagcctgggcaacatggcaaaactctgtctctaccaaaaaaaatacaaaacttagctgggtgtggtcccagatactcgaggagctgaagtggagaatcacttgagtgatttaaaacaaaaaaacaacatttttaggaattgccaaacttttttttttttttttcgagacacccaagctggagtgcagtggcgcgatactggctcactgcaacttccacctcccgtgtgcaagggattctcctgcctcagcctgccaagtagctgggactacaggcgcacaccaccacacccggctaattttttgtattttagtagagacagggtttcaccatgttgcccaggctggtctcaaactcctgagctcaggcaatccacccccctcagcctcccgaagtgttaggattacagtcatgagccactgcgcctggctggaattgccaaactttttaaaagtgactgcaccattttacaatccatcaacaatacatgtgccttctaatttctccatatcttcaccaacacttgttattgtcagtctttttgatattgccatcctagtgagcgtagagtggtacctcattgtggttttgatttccattttccctgatgactaatgatgatgagcatcttttcatgtgtttattggccatttgtacatcttctctgaagaaatgtcgattcagatccttttcttttttttcttttggagacagggtctcactctgtcacccaggctacagtgtagtgatgcagtcacagctcactgcagccccgacctatggggctcaatcaatcctcccaccttagcctccctagtagctgggactacaggcacatgccaccacacccagcttatttttgtattttttttgtagaaatgggactttgccatgttgcccaggctggtctcaaactccagggctcaagttattgattctgcctcagcctcccaaagtgctgggataacaggcatgagtgagcatgcctggcctgctttttttttttttttgagaaagagtcttgctctgtcacccaggctggagtgtggtggcacgatctcggctcactgcaagctccacctcccgggttcatgccattctcctgcctcagcctcctaagtagctgggactaaaggcacccgccaccacacccagctaattttttgtatttttagtagagatggggtttcaccgtgttagccaggatggtttcgatctcctgaccttgtgatccgcccgtctcagcctccgaaagtgctggaattacaggcatgagccaccgcgcctggcctggcctgcttatttttaagttgtcttcttcttattgggttgtaagaattccttataacaagtccctcatcagttatatgatttgcacatttattttctcattctgtggattatctttctccactgctgctcagacctctcttctgtttttaaggtaacaagaatgtggtaaccagagagcacttggaccgtatgaagaatagctgcatcgtttgtaacatgggacattccaacacagagattgacgtggtaagatcaagtagctcattattgggggcttttttctctccttcacaagaagcaaactggaaaatgagagagcagggtcacaagccatcctaaacatgactatcctggcagagttgtccacatcttttcacttactagccctatagcctgtgtttttggagactataaagtttcttcatctcaatttaataattctaaatgattgtcatcttctattcaagctcgatgcctgtttacaccataagccttatctgtatgtttaggattgagagcaagataaactcaaaactacaatgaatgatagaaactcagagctaagtgatacaatgaatgtgaatcagtatggtagtcagtattttgggggtgtttggttttaccataaagatgagataagtaggttggtccaaggaaataagggagagaaatctatgggctgggatgattatgttgcttaggattgactgtgtgtatcaaatactgcggtttcttcttttatccctctcttttattgggcgaggtcacccctcacatgttttccaaactgtagtaattgtgtctgcaggtgtcataatcaattcagcaccattgtgtagtagcatgtgttcttcaaacctggaaaatatatcactttgattctctaatttggttatattcaccctaaaattttccaatccaaaatagcacttggtactaataagttgcccaagtaatagttaatagaaatgttgtttcttttttttttttttttttgagacggagtctcactctgtcgcccaggctggagtgcagtggcgcggtctcggcttactgcaacctctgcctcctgggttcaagcgattctcctttctcagcctccagagtagctgggactacaggtgctcgctaccatgcctggctaatttttatgtttttagtagaggcagagtttcaccatattggctaggctggtctcaaactcctgaccttgtgatctgcccacctctgcctcccaaagtgctgggattacaggcatgagccaccacacccagccaagtgttgtttatttcttttcagacttaccaaagtatctctcagtgtgacttttactctggttttaaatttttctggcatttttatggcacgcttgtatttctctctgggtaactggcttaagcaaagtatgctttcatctccactgagggctgctctgattgagcttcagcattgccaggtaaggaccagctgatgtactgagagcttattggataatatttattatatatggtttcccttttaaattctgtgctctattcttccattattaaaaatagctggcagaacaacctaccaaagcccctttctaccctggggtgtctgagtggtatggccttattactctctcttaccatgatattttgcttacaatgaacaatttagttggtagttggttctttagttttcttttgcttaagtttcatttatgtgctatactgcctctttgctgaatgatcaaggatattagtatttctaaaatgatccagcaaatgattctcatttcctggatgactttgcttctagagcccccaaaggggaaaggcctaaagggaagtattcatgtcatgccctgggccctaatgggaaatcttcagaggaagggaaggggaaggaattttccttcctaaaccctcaagaagctctgaaataaaaataattccaaatgcagtgatgtaccttttgtatttttactttatctcatttcatctttttgacgactccatgaggcattattcttattcttaattttcagttgggaaactaagaagttaactaccttgtcaggcatataattgattcaagatgaaactggtgcacaggccaggcacggtggctcacacctgtaatcccagcactttgggaggctgaggcaggtggatcacctgaggtcgggagttcaaaactccatctcaaaaaaaaaaaaaagaaaaagaatatgatgtttgagaccatgtgtggtggctcacacctgtaatcccagcactttgggaggccaaggcgggatgattacttgagcccaggagttcgagaccagtctaggcaacatagtgagacctcatctctataaaaaataaaaaaaaacaaaattagttgggtgtggtggcttgcacctgtagtaccagcctggccaacatgatgaaaccctgtctctactaaaaatacagagattagttgggcttggtggcacacaactgtaatcccagctactccagaggctgaggcaggagaattgctggaacccgggaggctgaggttacagtgagccgcgatcacgccattgcactccagcctgggcgacaagagcgaaactccatctcaaaaagaaaaaagaaaccagtgcacaaaatccagggttttttttttactcctagtctagttttctttgttttgttttcctgtgtgttgtatttattatctcctcatgacttgtggattaacttcaaatcatgatggtaatctctccttcagaggcagcccagacataagtaacctcctaggataaagaccagaagactcttcaccttcaattacaaatattttttgtatgattgctatatgccagctgttgttctaaatgcttggagacagtgaacaaaacaagcaaatatttctaccctcatggagcttatatcatagtgagaagaaaataaacataataaatatgtaaaatttatactatgttagaaggcaaaagcaccacagaaaaaagaaaaagtagagcatggtgggagaattgagcactggattataatttgaaatagatcaggctgtgacccttattaagaatatgatgagccgggcccagtggctcacgcctgtaatcccagcactttgagaggccgagacgggtggatcacctgaggtcaggagttcaagaccagcctggctaacatggtgaaaccctgtctctactaaaaatccaaaaaaaatagctgggcgtggtggtgggcgcctgtaatcccagctactcaggaggctgaggcagaagaattgcttgaacccgagaggcggagattgcagtgagccaagatcgcaccattgcactccagcctgggtgacaagagcgaaattccatctcaaaaataaaaaaaagaaaaagaatatgatgtttgagacgatgtgtggtggtgggcgcctgtaatcccagcactttgggagaccaaggcaggatgattacttgagcccaggagttcgaggccagcctaggcaacatagtgagacctcatctctacaaaaaataaaaaaacaaaacaaaattagttgggtgtggtggcttgcacctgtagtaccagctatttgggaggctgaggcagaatcactggagcctgggaggcagaggttgtagtgagccaaaatcgtgccagtgcgcaccagcctgggtgacagagtgagaccctgactccggcaaaaaaaattttttaaaaaaagatgatatttgaggcagactggaaggaatttgccatgtggatttttatgtaaacagcatttcaagaagagagaaaggccagtacacatgccctcaggcaggagtgtgcttagtctgtttgaggaacaacaaggaggccagtgtgcttggaggagaatgagcgtaggacaaggaagagtggaagatgaggtcagaggggtaacaggccagatcttagagggcctcatagcccattgtaagaactcctgattatatcctgagagaactagggagctgttgagggtttataatctgacttacgtttttaaaggatggcttttattttaaaagaattgccctggttgctgtgttgagactagaccaagttttgcaagtattgccaggtggcccccatatctaccagtcacatgagccaagggccatctctcacttctctttgtgttcttcttggcggaagatatatagctaagctaaatggtccagaaaaggagatgctcagaggaacttttgaaaagttaaattattcaacctttggtgatagtgtcacagggcatgtaaaatgaaattcaaggaaatatcaaactcaactagtaattgaaaccgaatttttattcagtgtttagcaaatttatattgaatacctgctctgtgccagataccaatttactaaacaaatgacagtgaacaatatcccgtctctcagggagcatatattctaatgtgggagacaaataataaagaaatagattgttattgttagtgttgaagacaaatagcaagataagggtattggggattccattttagttagggtagtcaaggaagtctctttgaggagataacactttaaaaaacctgaatgaaataaaggagcaagccatccgagcattctgttcagagagaatggcaggtaaaagaccctgagggagacacctgcttgatgtgtttgaggaaaagaaaagaagtcactgtagcaggaacattgggcaagggggtgaggagaagagttaactcaaggaggtataggctatgtagagctttacaggtcatgttaaggactttagattttattctgaaagaagccattgggaggttttgaatagatgagtgacaaaatctgacttaggtttttatttatttatttatttatttttattttttatttttttgagacagagtctcgctctgttgcccaggctggagtgcagtggtgcaatctcggctcactgcaacctccgcctctttggtttaagcaattctcttgcctcagcctcctgagtagctgggactacaggcgcccgccaccacgcctggcagattttttgtgtttttagtagagtcggggtttcaccattttggccaggctggtctcgatctcctgacttcgtgacccaccagcctcggcctcccgaaatgctgggattacaggcatgagccaccgcgcccagccgacttaggtttttaaaaattactctggaggccaggtgtggtggctcatgcctgtagtccccagctattgaggaggctgaggtgggaggattgcttgagcctggaagttagaagtcagcctgggcaacatagtgagatcctgtctctaaaaataaaattactctggcttttgtataaagaaaaccctctggagcttgactaatgatagggataacagcaggttctttcagtatttctgactgtagaaagtggtggcttggattagatggacaagtggtagaggtgataagaagtgatacattgtgaccaatggaatttgctaaatggattggatgcacactatgagaaaaagagggaaatcagtaccagtcaactcagtgaaactgtgggagaatgatttggtaagtatcgagatatttttagtaatcaaaatttttaaagagttttttttccttttttggtaggaattcatagtttaaccttgagatgttgcctgttgcatatttaagaaggagtagctcatcaaaagagttggtcatttagaaagctgcattttttttctgagaaatatgaatgctgtgaatactgaaggatctgggatagggattatgctctccactgtcttttggccgtatctttcttttatatgtttgctttgtcttaaaagcagacctgcagccaggtgtggtggctcacgcctgtaatcccagcactttgggaggctgaggcaggcggatcatgaggtcaggagttcaagaccagcctgaccaacatggtgaaacgccatatctactaaaaatacaaaaattagctgggcatggtggcgtgtgcctgtaatcccagctactcaggaggctgaggcaggagaatcgcctgaacccgggaggcggaggttgcagtgagccaagatcacgccactgcactctagcctggatgacagagtgagactccgtctcagaaaaaagcagacctgcttacccatgtgtatcacatagaaggcctgtgtaattgtaagcttcacaattcaggtggtcaaaccagtaagtacataggctttaaacattttttccagccgaagaacgatttaacctgagactttgtgctttacaggactagaactacagttgttctccctgaaaaaaaaaaaacaaaaaaaaaccggatatgcactgttcagaattatataagaccaatttgtgcaagcataatgagtggccagtttatggtgggatgtacacctggtttgggaaggtagtctgcacaggaatcccttttcccggtaggttgtttagtgattataggtccacagcaaagacaactggatgtttttaagagagattcttgtcaagttgtgccagccgtaaggtaggaaacccttctgctcttgaggaatgtgactgctgactaggccttaataggcaggttattggagcttcctggacagtggtagagataagttaaccaagtttctcttcaaacccctttttaaacttactgtcaggctttcacctacagcatagccattccagtgctttagtaaactgcctctactaagcactggttattttcttatgtttataagaagtgtcctttccttgattctgccatacctttcttcccaaggaatacttccaaagatgggttttagctcttagctcccaatcaccaagattgcttggcctctggaaaattaggggtgtgaaacactaagaacctgaaatactttaaactcctgtcatctcaataaaaactgccattgtcaccaagagtatctcttgactctttgtggttattaacctccatggcactaagctctaaaggctaatggattctactttgtatatccttaacttctcaaaatggtctgtttgcttaaattctttttttttttttttttttgagacaagatctcactgttaccacccagactggagtgcagtggcacaatctcagctcactgcagactcgacttcctgggctcaagcattcctcccacctcagcctcctgagtagctgaaactacaggcgcacgccaacatgcccagctaattctgttcttttttttttttgtagagacaaggtctcactatgttgcccaagctggtgttgaactcctgggctcaagggatcttcccaccttggcctcccaaagtgttgggattacaggcatgaaccactgtgcctttctcttaagttctttttaacccttaaatttacagtatttatttataacatttattttttaaaattccaattttaaagtaatacttgcttagtttaaaaatgcaaacactacaaatatgcttaaaataagcaaaaaacttccataattgagattacactatattgttctgcaacttgatagtgagtgggctgggtgcggtggctcacgcctgtaatcctagccctttgggaagctgaggcaggcagatcacctgaagtcaggggttcgagaccagcctggtcaacatggtgaaaccccatctctactaaaaaatataaaaattagctgggcatgatggcaggtgcctataatcccagctattcgggaggctgaggcaggagaatcgcttgaacccaggaggcagaggttgcagtgagctaagatcatgccattgcactgcagcctgggtgacagagtgagactccatctcaaaaaaaaaaaaaagaatagtgaatggttttcacgttaacacatatatgtctgtcttttttttggagctccttgctgtagtacctttttaaaaaagagttgtataatattccattatatggaactgccctgatttacttaaccattcccttatttatttacatttttcactattacaaataagcctggattgaacattcttgggcacttatatttctgaacttgagcaagtgtttttattggatagagccctaaaaaagtgaaactgattggtcaaagattaggtacatataaaattttgctagctgctgccaaattgtcctccagaaaggttgaaccaatttatgaaacttgacatttcaagaaattgtatgtgtttcccatctacctaataaagaaacggtccacaccattaatatagttctgaatgcactgaaatataattgtatatgtctttcccactagattggtacttccttggggataggaatcatgaatttctaaactttagcatcccattgtttgcttaaataaaccttgaaatacaaaaatgaaaagaaagtactgtctttgtccataagtggctcacagcccagtaaaggaatccacagtcttatctatattcatgctctttactacaatgactagaatatggtatgtaccctgtaaatcattattgtataactaaaagcgtttctttttatttgtctaaaaactatttggcagaacttcttaattttatcaaatgagccaatgggtagttttggaatatgaactcactttctattttaggcattgcctgttggaagaaagaaggtgttgtcttaagtctacaccccgtggctgttatttgattgctgctgttaaaaaaacataaccttttttctcattttctctgaatatacaatatacagaaatggaaggagggtgagccattgggagctttactctaccattaagcatttctttaaaggctacctcacatttgcacttaggtcacaaagcttctgtaactagggtgaaccaccatcattgaaaaggtggaacctgggaccttcggatatgagggcagaaccttgggccccagcatgctatgtttaggacatttggcctcttactaaacccactcagctatgttcctcctttttttctttgtttcttcagcacttatatattcagtttgcactgtattaatttgcacttgtttgcatgttgctttgtaagtattttaagggcatttttttcctctcacatatatattgttttgtgtccctggctaaagtacaagctttttgaaggcagaaaccatgtctttggtttcttttgtatttcccatagcaccttttactgtgagagtgggcacacagtatatgttgtggaatgacatcctgagtgatccctccctggctgggcctcagattaaattccctgaaatggaacagtcctaaccaacacaggacaggtattctccatctggcatgttggttgctcctttcaacctgctatttgaaatggctcccttcaacatctttctgttcccacagtggggcttgctatggctaatgctgtacttgctgtatgtgttccaggcgagtctgcggacaccagaactgacctgggagcgagtgagatctcaagttgaccatgtgatatggcctgatggcaagaggatagtactgctggcagaggtaaggctgagactggcaaaaatactcccccacaacaggagagactgcaatacccaggtcccctcctcctcatgttctcgaatactttcaactcctctgttaagcacaagtttgactactttcccaatggattttacttctaattgtgaaagatcttttcattcagcaattaagaaactattttggttccccacttttcaccaattatcctgtctctccacgtcaatccacaggttgagttagataattattactatagaaggaattcacagatagaaccagtgccactttgagtgatgcatacaaagagataatgtcacttgtgggatgttttaatcactaagcacaaagtagatatgcccgactgtaaccaggactatcttaggcaagttctgggaatgtatgtttttactgatagattccctgtttttgaaggtccattcccttgaattgagccagatgagtagtaggtacctacctagatatcaattgctcaattgatatttccccatcctagctcctagctcacattgacactattgactttcattttattggcttccatgtcagtgtttgaccacttttcctttcttaaaagctcctcttccctagtcctggattcctgacagctataatattagatgccttctattcttaccttgaagctttctcttcttcagagaaagataccaaaatatcaaggaggataataatacttttctcaattttgattttcagttggttttttttctttttttatattaaagaacctgaatatgaaaatgtaaaatatacattgtctttatctaggggcccataagttaggagtttttagtgtccttactgttttcttcacattttcctcactttatctcatcttctcagatacttcagggcatttgtaaagggactgaactatttcttcacaaggaaggagtatatatgaggaggagatgggcagattgccaaatatgcattaatagctttgatgtcagtctgctgactgatgacttgtttctagctgccctaggaggtcccacctggtaattttggtgacaaaagcaagtaccatgggtgtttttggctagatggttgagcaaaaaggtggtcaggcttcataggaaacaaaataggaaagggtggcattgggggcaatttctagttcttctactgtctgaatcaccaactcaaaatacaaggctgacaatgctgtctttgaattcaggagaagcaaactgaaggagaagcacaaaaatcatcacagctatggtgaaaccctgtctctacaaaaaaaaaaaaaaaaatacaaaagttagccgggcatggtggcgcacacctgtgatcccagttactctggaggctgaggcaggagaatcacttgaacccagggggcagaggttacagtgagtcaagatcatgccatggaactccagcctgggcaacagagggagactccatctaatcaatcaatcaatcaatcaatcaatcaatcatcacagcttcctaagtccaaatatacctcccctcacaacctggagagattgtccctggatttgactgatcattgtttatttcaagacagtctttaaaagaaatgccgatcctcagaaggaggatattttgctatagagagtggaaaattcaagagaagtacactgatatttggcataagcctcagtgtcatatgaccatctgtattcctttttaaataattccagaaatcttttagctattagtttcatcagattttccagaattttagtggtttcatttaaatgtcagtcagttagttcttatatattgaatagctgctttttttccagcagtgttagtcaggaagtgtttggaaaatggtggtcatgcttctcttccctcacttctcaaaggccagcgactttgtcctaatccatttgtgtcttcacctttgatcactagggccgcctgctgaaccttagctgctccacagtgcctacatttgtgctctcaatcactgctactactcaggtaaggcttccagagtgggatagcagtagtctggagaaggtcctcagacccaccaggtttcacttgcttgggtagattgccatgaatggcacatcagcatccatctctctgcttttctaggctcttgccttgatagagctttacaatgctcctgagggtcgctataagcaggatgtctacctgttgcccaagaagatgggtaagtatttactcttccatctccatccttaccaaagtagttcagagtctgaggttaaaggaagtttgggggcattaacttacttaaggatgggggaaaaaaggtaccttcatcttgtaaagtaggaattaggattcctaggtgccattcccatttatttatcccattttctacatgtgttgccctagcgaagttgtgatattatgctgtgatttattttacctgcctgtgaattttaaggattttttttttcttaaagtatctttatgtgggaatctcaaaggagaaaaaaaaaatcttcccttaaaagagaagaatcatctcctaccttgtgacatctgacttactccaattctaggctgccaaatagcccctaccaaacttttctcagacgacacaagactttcttactacaccttccaacaccaatcccagtgcttcaggccaaaggagagatgtggaataggagctatttagttatgtgggtgttttgtataagagaaacattaacctgtcttaaatttttaaagagcctgcctcaagcacctgaactgatacagtgtgtttataaactcctcaggcaaagatcaggtaataaataagcttctggttttgttttgccttagcactaggtatataacaactgttaaaagttgatacattttccctttagtagacactttagaaggatataaaagcaacagcacagtccatattctgacagaatgtataatgaagttgggagaccaaacaaatacataggaaatgacataagattatgaataagtactatgtagtcagataatagaatgtgaacagaaacccataagaattaagagtactaaaagcaaagcaaacagttcatttatcccatttagtatccttcttagtttttccattcaagtttccccaggcattagttgttttaaatgacccaaagtatggagtccaaggcaaaactcaagttggagcttcccattatttagttcccacattatcctattccttcttttaaatcttaatgcctgttgtttctttcatctctcctgcacttttctggaaggcagggttcaaagctgagttagtaaggatgaattattaaggctttggaaagcactgggcttgaagctgaaggcagctattccttagaattgaggaccagtgagcgaaggttgaacatttttcattcagctccaggaattagaaggtgtctttgaactttttaaggcctagcttggggacaatagccatcagataaaaggcatgaatgcttataccagggcttctgtggtctgttccagatgagtatgtggccagcctacacctgcctacctttgatgcccacttgacagagctgacagatgaacaggccaagtatctgggactcaacaagaatgggcccttcaagcctaattactacaggtgccttgggctccccagaaatcagggacacctgggcagtgatgagcttcctgcactggaattggtctttgcatccccaaccacatatgcttacatgaactcagaaaaatgaacccacttcccctcactgccaccttcaaaagactcttcaaggccttaaatagtattccccttcctgaatttgccttttggagatagagaggtggagtttgggtaagtggctatttgcctcattaaataaagttccccttcctcaattcctttccccatttcatcttgttgctatgatttttatctctttatggagaaatattggcctttttcaatgatgtgaaaaggaaacacagttatttcctgtcactgtacactccagaaaagtctctgcctccctgttacacctttaggcaggctcttcatgtcccagcatccccattagctgataacatcacagtctcatctttctttttccctccaggtattaagttcctgtaactcaaaccagaatttttaaggaatagaactccaagccttttctccactactatacaagaaagaattcagcaagctgcttctccaatcaaagctgcctgccgtgctcaccctgtgtgttaggttatttatttattaaaatcaagaatcctgtgcctgtagtgttggcccagagtgtggttactgccctgagggccatgaaagccacagaggatgggctgaggaaggaaagaaatggggttactgctcccagtgcatcatttgcatcattccccattgactgaatcctcagcagtggccgtttttcctcttgtccaggctcacgagttagtccagggattccatactccctattccctggagttttctggaataaattttcagcacctgcttttctcagcttggcccttccccgggtgaggccgtttggaattaacatggccagtgtttcacacaagattgggttcccaatcttgaccatcactatcactgccttctttatataaaggctaataaggaaggagtgttatttatggctttgccaagctacatcaagaactcagctgtgctgtgcctaccaggggtctcctttcttacccaggactcctttcttctccttgaatatttatgtccattttaacacttcctggttgcaagagggatgtgcctccattatttcctccacagttttggtatttgtcagacatttgttctgctgtctttctaatccagccaacgtctgctcaggaagtggggccagctccactgggacccatagttttacttccttgtcatttgattggatagtttccaaggaagcccctccagattggcactatctcagaaaaggagagcttgttgtgaaacactgcttcctgaaacttcctgctattgcctaaagctacgtctgaaactgagtagggaaaggcatacttttccagggacttagggggataggctttggaaatgggacaggtctttcagactcacagcttgataccctaacaaagcagagtatatttatttgtttcccaggaaggccattgcagtttgactggctgagggatacagagatgaaattgtaaactgtatccagattatcaaagctaatttgactagtttgaacctcgtcagacattcattcctttggccattgccatggatgaaaccgagatctgcagtctgatctgtggacttctctgctggcatatcttttatgatttaacctcttccatttgatgattctgtatttcagagtcagtttcttgagtaactccagtgctacaaaaagaattagtaatgtggtgtgggcagcgtgacattttatgtcccacccaaaaattggattccttttggagactgatctgttggtctcaggcatttcattaggaccagattggttctaagagttagtctggactggccctaggaaacttgaattaaataagcctcttccccttaccgatcctttttaacactctcaggtttgtttgtttcccacttttttcctatgctggtctgcctcaaagtctcaagaccaaggtgactcaagataacaccagaccacgcatgatcaccaaaaccttcccatcctgattctcttcttctacctctaccctctccaacttctcctggtcttcacatatactctcaaagctagtctgaaagtgaccttactttcggaagtagggaagtggaactttggtaaatgactgtttgcctcatttaatagtatacaggctcagcccatagactacagttcttcagaggccatatgtctcagcaagtactggttatattctttttttgtaaggaagatcataaatgctaaaaattccactaagccattcagttcttccttttgcctacctagtcctgatttttgtattaattggttccctttagcaagggattcagatctttgtaccttatcttatatccagagcagattccatttggcagatagatggtctctagcctattgtattcttagaccaaaaatcataacctgctgtttctcagcaaagccttgctctctggagcttactatgtgctggtacttaaagagtacattctgccttgctgtagtgaagagacccactccaaataaaaaaggggccacacggggcttctaagttaggttgccagtgttgctgcccatgatgagttatttgcctctgagtttcagatgacctctctgtagggacactgtgttatcaaccattaagaagaaagaaccacaagcctcccaagtatttgggttctatcttagggttgaaatctggtcattattccctctacccttggaatcagagcaatgtgtcttctttcctccaacctcttaccttagatgcatcctggttatctggaagcatgggaaagaaggctacttatctctttgtatgtggctccagtctgtgaggatacataacattttctctacaatgaatctgtgctaatattttgccttctttctttcttttcttttcacccttagagacagggtttcactatgttgcccaggctggtctcaaactcctgggctcaagcaatcctcctgcctcagcttcctgagtagctggaaccacaggtgtgtgctaccgtgcctggcacttttttgccttcttaatggagatattcagttttctttttttcatttaaacaaagaaaaaaaatgtatctactctaccttccctctgctctcctccctccctatcctacttgcccatatgagcacggctccccatggccacatactcctgcaaagcttttatgctgcttcgcttttctctaaacagatctgatattgctgctcctgtggttttctcaaaattaactttgccgtggtttttaaaaaggaatcaaaatgcattgttgcattaagctttttcaataaaggaaaattacggaaggaaaataggcaacaccagcaaattatatgtggacaggttctaaactctatatatacatatatatatatatatctatatatctatatacgtaatcatctagttctgtcatcttactgaaaggaataacacttctaaagatcaccatttctgagaagttcttggaaatctttatgtctaagtgattgtattagatcagcaataatgactatgtaatctcaaaaaacaaataaaatattcttaacatgga
